(19) United States
(12) Patent Application Publication
(10) Pub. No.: US 2011/0319597 A1
(43) Pub. Date: Dec. 29, 2011

(54) VARIANT DOMAIN ANTIBODIES

(75) Inventors: Raina Jui Yu Simpson, New South Wales (AU); Zehra Elgundi, New South Wales (AU); Anthony Gerard Doyle, New South Wales (AU); Philip Anthony Jennings, New South Wales (AU); Robert Daniel Gay, New South Wales (AU); Adam William Clarke, New South Wales (AU)

(73) Assignee: Caphalon Australia Pty. Ltd., Macquarie Park (AU)

(21) Appl. No.: 13/058,422

(22) PCT Filed: Aug. 13, 2009
(86) PCT No.: PCT/AU2009/001043

§ 371 Date: May 11, 2011

Related U.S. Application Data
(60) Provisional application No. 61/089,019, filed on Aug. 14, 2008.

(30) Foreign Application Priority Data
Aug. 14, 2008 (AU) 2008904175
May 13, 2009 (AU) 2009902142

(51) Int. Cl. C07K 16/24; C12N 1/19; C12N 1/21; C12N 15/13; C12N 5/10

(52) U.S. Cl. 530/387.3; 536/23.53; 435/328; 435/252.33; 435/254.2; 435/419; 435/252.3

(57) ABSTRACT

The present invention relates to domain antibodies which have modified framework regions such that the potency or level of binding of the domain antibody is improved. In particular the present invention relates to domain antibodies which bind TNFa in which changes have been made to framework sequences and to constructs including these domain antibodies.

### FILING DATA

[0001] This application is associated with and claims priority from Australian patent application no. 2008904175 filed on 14 Aug. 2008, U.S. patent application No. 61/089,019 filed on 14 Aug. 2008 and Australian patent application no. 2009902142 filed on 13 May 2009, the entire contents of each of these applications are incorporated herein by reference.

### FIELD

[0002] The present invention relates to domain antibodies which have modified framework regions. In particular the present invention relates to domain antibodies which bind TNFα and to constructs including these domain antibodies.

### BACKGROUND

[0003] The smallest naturally-occurring functional binding component derived from an antibody is the single variable domain, also known as ‘domain antibody’ (or ‘dAb’). This may be the variable domain of the heavy or light chain of an antibody (termed ‘VH’ or ‘VL’). The functional ability of isolated variable domains was first demonstrated when a cloned repertoire of murine VH genes were expressed in bacteria and shown to interact specifically with one or more antigens (Ward et al., 1989).

[0004] Single variable-like domains occur naturally in camelids (known as VHH) and cartilaginous fish (e.g. V-NARs in sharks) mounted on Fc-equivalent constant domains (Hamers-Casterman et al., 1993, Dooley and Flajnik, 2005 and Streltsov et al., 2004) and are able to bind to cognate antigen without a complementary VL domain (Muyldermans et al., 1994). In humans, the natural occurrence of such single chain immunoglobulin molecules is linked to the unbalanced synthesis of heavy and light chains and is associated with malignant disorders, such as multiple myeloma (Jones, 1848).

[0005] Development of combinatorial libraries using variable gene chain shuffling and selection methods, such as phage display have made it possible to generate human dAb libraries from which human variable domains specific for a range of antigens have been selected. The resultant dAbs have avoided aggregation problems associated with isolating human domains that would normally be complementarily paired. Further, low immunogenicity afforded by the utilization of human variable domains has empowered the development of dAbs for therapeutic applications (Holt et al., 2003).

[0006] Domain antibodies represent good candidates for therapeutic agents as they can be engineered to specifically target molecules associated with disease. They have the additional benefits of being well expressed in bacteria, yeast and mammalian systems. Being of a small size (ranging from 11 kDa to 15 kDa), domain antibodies have potential for enhanced tissue penetration. Moreover, therapeutically important serum half lives have been engineered into domain antibody constructs (WO 04/058820A2).

[0007] Tumour necrosis factor alpha, or TNFα, is a multi-functional cytokine that plays a central role in immune regulation, infection and inflammation. While normal levels of TNFα are important to immune homeostasis, excess production of TNFα has been implicated in the pathogenesis of numerous diseases including rheumatoid arthritis, Crohn's disease and psoriasis. Blocking the activity of excess TNFα is established as an effective therapeutic strategy.

[0008] Domain antibodies targeted to human TNFα have been described. These include a human VL dAb (WO 2005/035572), VHH derived dAb (WO 2004/041862) as well as a TNFα dAb consisting of the framework of a VH domain used as a scaffold to display TNFα targeted peptides (Qin et al., 2007).

[0009] Engineering efforts aimed at improving antigen binding affinity of antibodies and dAbs are more commonly focused on hypervariable or complementarity determining regions (known as ‘CDRs’) that make specific contacts with the antigen. The CDRs form extended 0 loops that are exposed on the surface of the variable domain to provide a complementary surface for antigen binding. The three CDRs are flanked by four framework regions of conserved sequence that fold into two 13 sheets. The framework residues provide a scaffold for mounting the CDR loops and may also directly or indirectly influence antigen binding by positioning of the CDR loops (Fischmann et al., 1991 and Tulip et al., 1992). Some framework residues may directly alter the conformation of CDR loops by making atomic interactions between framework and CDR residues (Kettleborough et al., 1991, Foote and Winter, 1992 and Xiang et al., 1995).

[0010] This present invention is relevant in the field of antibody engineering. This invention particularly describes domain antibodies comprising specific framework variants that possess improved function. The invention is further relevant in the development of domain antibodies for targeting human TNFα and for the development of such domain antibodies for therapeutic applications.

[0011] Bibliographic details of the publications referred to by author in this specification are collected alphabetically at the end of the description.

[0012] Reference to any prior art in this specification is not, and should not be taken as, an acknowledgment or any form of suggestion that this prior art forms part of the common general knowledge in Australia.

### SUMMARY OF THE INVENTION

[0013] In a first aspect the present invention provides a modified dAb in which the framework sequences of the unmodified dAb are as set out in SEQ ID NO 1 and wherein the modified dAb includes at least one substitution selected from the group consisting of D1A, D1Y, D1K, I2L, I2P, Q3Y, Q3F, Q3D, Q3H, S7A, S7G, S7D, S7Q, S7N, S9A, S10A, S10L, L11Q, S12A, S12L, S12V, S12T, S12Q, S14A, D17Y, D17H, R18D, R185, T20Y, T22A, T22Y, T22Q, T22H, T22K, Q38H, P40D, K42A, K425, K42H, P44L, K45S, K45L, K45Y, K45D, K45H, 148A, Y49S, Y49D, Y49H, G57A, G57S, G57L, G57Y, G57Q, G57H, G57K, P59A, P595, P59D, P59H, S60A, S60G, S60L, S60Y, S60D, S60Q, S60H, S60P, S60K, R61H, F62Y, T69D, D70Q, L79A, L79G, L795, L79Y, L79V, L79D, L79Q, L79H, L79K, F83A, F83S, F83L, F83Y, F83D and conservative substitutions thereof and combinations thereof.

[0014] In a second aspect the present invention provides a dAb which binds TNFα, the dAb having SEQ ID NO 1 wherein at least one amino acid in the framework regions is substituted, wherein the dAb has improved TNFα neutralizing potency in comparison to the dAb of SEQ ID NO 1.

[0015] In a third aspect the present invention provides a dAb which binds TNFα, the dAb having SEQ ID NO 1 wherein at least one amino acid in the framework regions is substituted, wherein the dAb has improved TNFα binding and/or improved protein expression levels in comparison to the dAb of SEQ ID NO 1.

[0016] In a fourth aspect the present invention provides a V_{L} domain antibody comprising a V_{L} framework acceptor sequence wherein the framework sequence has been modified such that the framework comprises at least one amino acid substitution at least one position selected from the group consisting of 3, 7, 12, 60, 79, 83 and combinations thereof.

[0017] In a fifth aspect the present invention provides a nucleic acid molecule encoding the dAb of the first, second or third aspects of the present invention.

[0018] In a sixth aspect the present invention provides a transformed cell comprising the nucleic acid molecule of the fifth aspect of the present invention.

### BRIEF DESCRIPTION OF THE FIGURES

[0019] FIG. 1. TNFα binding ELISA data of Y49 variants. A representative histogram of TNFα binding ELISA showing resultant binding of variants with substitutions at position forty-nine.

[0020] FIG. 2. Representative TNFα neutralization data obtained using the high throughput 5-point format of the L929 neutralization assay.

[0021] FIG. 3. Ferritin binding ELISA data of the Ferritin dAb Fc variants. In the key, ‘Fe dAb Fc’ denotes Ferritin dAb Fc proteins.

### DETAILED DESCRIPTION

[0022] The present invention relates to dAbs in which one or more substitutions have been made in the framework region of the dAb in order to improve antigen binding efficiency, neutralizing potency or other characteristics.

[0023] In a first aspect the present invention provides a modified dAb in which the framework sequences of the unmodified dAb are as set out in SEQ ID NO 1 and wherein the modified dAb includes at least one substitution selected from the group consisting of D1A, D1Y, D1K, I2L, I2P, Q3Y, Q3F, Q3D, Q3H, S7A, S7G, S7D, S7Q, S7N, S9A, S10A, S10L, L11Q, S12A, S12L, S12V, S12T, S12Q, S14A, D17Y, D17H, R18D, R185, T20Y, T22A, T22Y, T22Q, T22H, T22K, Q38H, P40D, K42A, K42S, K42H, P44L, K45S, K45L, K45Y, K45D, K45H, I48A, Y49S, Y49D, Y49H, G57A, G57S, G57L, G57Y, G57Q, G57H, G57K, P59A, P59S, P59D, P59H, S60A, S60G, S60L, S60Y, S60D, S60Q, S60H, S60P, S60K, R61H, F62Y, T69D, D70Q, L79A, L79G, L79S, L79Y, L79V, L79D, L79Q, L79H, L79K, F83A, F83S, F83L, F83Y, F83D and conservative substitutions thereof and combinations thereof.

[0024] In the three symbol code used, the first letter stands for the amino acid in the unmodified dAb construct, the last letter stands for the substitution amino acid and the number in the middle is the residue position. For example, S60A describes a dAb variant with single substitution at position 60, where the Serine in the unmodified dAb is replaced by an Alanine. References herein to amino acid positions of unmodified dAb refer to the numbering of amino acids as defined in the Kabat database of Sequences of Proteins of Immunological Interest (“Sequences of Proteins of Immunological Interest”; US Department of Health and Human Services). The Kabat numbering is typically referred to in the art as the ‘Kabat convention’. Variants described in this invention that comprise of multiple amino acid substitutions are denoted by a series of the three symbol code separated by ‘_’. For example, S60A_F83Y is a dAb variant comprising double substitutions where the Serine and Phenylalanine that were found in positions 60 and 83 of the unmodified dAb were replaced by an Alanine and a Tyrosine, respectively.

[0025] In the sequence set out in SEQ ID NO 1 the framework regions are residues 1-23, 35-49, 57-88 and 98-108.

[0026] In various forms of the invention the modified domain antibody comprises a substitution selected from the group consisting of L79G, L79S, L79Y, L79K, L79D, L79A, L79Q, L79V and L79H; and/or a substitution selected from the group consisting of S60G, S60A, S60D, S60L, S60H, S60Q, S60Y, S60P and S60K; and/or a substitution selected from the group consisting of S12T, S12L, S12V, S12A and S12Q; and/or a substitution selected from the group consisting of F83Y, F83L, F83A, F83S and F83D; and/or a substitution selected from the group consisting of P59A, P59S, P59D and P59H; and/or a substitution selected from the group consisting of G57S, G57Q, G57H, G57A, G57L, G57Y and G57K; and/or a substitution selected from the group consisting of Q3F, Q3Y, Q3H and Q3D; and/or a substitution selected from the group consisting of S7A, S7N, S7G, S7Q and S7D.

[0027] In a second aspect the present invention provides a dAb which binds TNFα, the dAb having SEQ ID NO 1 wherein at least one amino acid in the framework regions is substituted, wherein the dAb has improved TNFα neutralizing potency in comparison to the dAb of SEQ ID NO 1.

[0028] In a preferred embodiment of the second aspect of the invention the substitution is selected from the group consisting of D1A, D1Y, D1K, I2L, I2P, Q3F, Q3Y, Q3D, Q3H, S7A, S7D, S7Q, S7G, S7N, S9A, S10A, S10L, S12A, S12L, S12Q, S12V, S12T, S14A, R18D, T22A, K42A, K45S, Y49H, G57S, G57Q, G57H, P59A, P59S, P59D, S60G, S60A, S60L, S60D, S60Q, S60H, F62Y, L79G, L79S, L79Y, L79D, L79K, F83A, F83L, F83S, F83Y and conservative substitutions thereof and combinations thereof.

[0029] In various forms of the invention the domain antibody comprises a substitution selected from the group consisting of L79G, L79S, L79Y, L79K and L79D; and/or a substitution selected from the group consisting of S60G, S60A, S60D, S60L, S60H and S60Q; and/or a substitution selected from the group consisting of S12T, S12L, S12V, S12A and S12Q; and/or a substitution selected from the group consisting of F83Y, F83L, F83A and F83S; and/or a substitution selected from the group consisting of P59A, P59S and P59D; and/or a substitution selected from the group consisting of G57S, G57Q and G57H; and/or a substitution selected from the group consisting of Q3F, Q3Y, Q3H and Q3D; and/or a substitution selected from the group consisting of S7A, S7N, S7G, S7Q and S7D.

[0030] The domain antibody may include multiple substitutions. These multiple substitutions may be selected from the group consisting of S60A_F83Y, Q3Y_S12L, S12L_S60A_L79Y_F83Y, S7Q_S60A, S7Q_S12L, Q3Y_S7Q, S12L_L79Y_F83Y, Q3Y_S60A, S12L_S60A_F83Y, S7Q_L79Y_F83Y, Q3Y_S12L_S60A_F83Y, Q3Y_S7Q_S12L_S60A, Q3Y_S60A_F83Y, Q3Y_S7Q_S12L, Q3Y_S7Q_S12L_L79Y, Q3Y_S12L_L79Y, Q3Y_L79Y, S7Q_S12L_S60A_F83Y, L79Y_F83Y, Q3Y_S12L_L79Y_F83Y, S60A_L79Y_F83Y, S7Q_S12L_L79Y_F83Y, Q3Y_S7Q_S12L_S60A_L79Y_F83Y, Q3Y_S7Q_S60A, Q3Y_S7Q_S60A_L79Y and S12L_S60A_L79Y.

[0031] In a third aspect the present invention provides a dAb which binds TNFα, the dAb having SEQ ID NO 1 wherein at least one amino acid in the framework regions is substituted, wherein the dAb has improved TNFα binding and/or improved protein expression levels in comparison to the domain antibody of SEQ ID NO 1.

[0032] In a preferred embodiment of the third aspect of the invention the substitution is selected from the group consisting of S7A, L11Q, D17Y, D17H, R185, T20Y, T22Y, T22Q, T22H, T22K, Q38H, P40D, K42S, K42H, P44L, K45L, K45Y, K45D, K45H, 148A, Y49S, Y49D, Y49H, G57A, G57S, G57L, G57Y, G57Q, G57H, G57K, P59S, P59D, P59H, S60A, S60L, S60Y, S60D, S60Q, S60H, S60P, S60K, R61H, T69D, D70Q, L79A, L79S, L79Y, L79D, L79Q, L79H, L79K, F83A, F83Y, F83D and combinations thereof.

[0033] It is preferred that the substitution is selected from the group consisting of S7A, Y49H, G57S, G57Q, G57H, P59S, P59D, S60A, S60L, S60D, S60Q, S60H, L795, L79Y, L79D, L79K, F83A, F83Y and combinations thereof.

[0034] In a fourth aspect the present invention provides a V_{L} domain antibody comprising a V_{L} framework acceptor sequence wherein the framework sequence has been modified such that the framework comprises at least one amino acid substitution at least one position selected from the group consisting of 3, 7, 12, 60, 79, 83 and combinations thereof.

[0035] In a preferred embodiment of this aspect of the present invention the domain antibody comprises at least one framework substitution selected from the group Y at position 3, Q at position 7, L at position 12, A at position 60, Y at position 79, Y at position 83 and combinations thereof.

[0036] As mentioned above the reference position number in the fourth aspect uses the Kabat numbering convention. As will be well known to persons skilled in this art a number databases providing VL and VH framework acceptor sequences are readily available. Examples of these databases include the Kabat (www.kabatdatabase.com/; Johnson and Wu, 2001), IMGT (http://imgt.cines.fr/; Lefranc, 2003) and VBase (http://vbase.mrc-cpe.cam.ac.uk/; Retter et al., 2005) databases.

[0037] In a preferred embodiment, the dAb is attached to an Fc region or a modified Fc region such as described in WO 2007/087673, (the disclosure of which is incorporated by reference) with or without the cysteine substitution. The sequence of the unmodified anti-TNFα dAb attached to the modified Fc is set out in SEQ ID NO 2. It is further preferred that the truncated CH1 and modified hinge is XEPKSZDKTHTCPPCPA (SEQ ID No: 3) wherein X is valine, leucine or isoleucine and Z is absent or an amino acid other than cysteine. In certain embodiments the modified Fc is SEQ ID NO 6 or SEQ ID NO 7.

[0038] When the dAb is attached to other domains, then the protein in its entirety is herein referred to as a ‘dAb construct’.

[0039] In a fifth aspect the present invention provides a nucleic acid molecule encoding the dAb of the first, second or third aspects of the present invention.

[0040] In a sixth aspect the present invention provides a transformed cell comprising the nucleic acid molecule of the fourth aspect of the present invention wherein the cell comprises the nucleic acid molecule.

[0041] The transformed cell may be either a prokaryotic or eukaryotic cell. Where the cell is a bacterial cell the bacteria itself may be used therapeutically as described in US 2005/0101005 and WO 2000/023471, the disclosures of which are incorporated herein by reference.

[0042] In certain embodiments the nucleic acid molecule has a sequence as set out in SEQ ID NO 8 to SEQ ID NO 708.

[0043] The present invention describes improved dAbs in which substitutions have been made in the framework regions. This highlights the importance particular framework positions play in improving potency and other characteristics. The dAbs of the present invention display improved function when substitutions at particular positions are made with amino acids of more than one amino acid class. This invention teaches the value of strong consideration of amino acid utilized at the positions of 1, 3, 7, 12, 57, 59, 60, 79 and 83 in a variable immunoglobulin domain (using the Kabat numbering convention). These positions are herein referred to as ‘robust’.

[0044] In yet another aspect, improved dAbs are variants at positions 9, 10, 12, 14, 18, 42, 79 and 83 in VL dAbs. These are dAb variants where the described framework substitutions occur at a residues whose atoms lie more than six Ångstroms (6 Å) from those CDR residues. Prior art teaches that these residues being spatially distant from CDR residues are unlikely to interact directly with the antigen, and thus unlikely to affect the interaction between the dAb and its antigen.

[0045] As described herein, a “domain antibody” or “dAb” refers to a single immunoglobulin variable domain that specifically binds a given antigen. A dAb binds antigen independently of any other domains; however, as the term is used, a dAb can be present in a homo- or heteromultimer with other domains where the other domains are not required for antigen binding by the dAb, i.e. where the dAb binds antigen independently of the additional domains. The dAb may be a heavy chain variable domain (VH) or a light chain variable domain (VL). A dAb describes the one single variable domain that is one of many domains found in an antibody molecule. The dAb of this present invention is a VL, further it is of kappa subclass (Vκ).

[0046] A domain antibody or a domain antibody construct is not an antibody. A domain antibody or dAb is one domain within an antibody. An “antibody” is a tetrameric multi-domain glycoprotein. An antibody consists of two identical pairs of immunoglobulin chains, each pair having one light and one heavy chain. The light immunoglobulin chain, which can be of either kappa or lambda subclass (Vκ or Vλ), comprises two domains, a N-terminal variable domain (VL) and one constant domain at the C-terminus (CL), while the heavy chain contains four modular domains, a N-terminal variable domain (VH) followed by three different constant domains (CH1, CH2 and CH3). The variable domains of the light and heavy chains are together responsible for binding to an antigen. The antigen binding surface of an antibody is afforded by the two variable domains, whereas that of a dAb is present within the one single domain of the dAb. It is within the scope of this present invention that the improved dAb described herein may be relevant to a subset of antibody molecules whose antigen binding surface is comprised entirely of only one of the two variable domains.

[0047] A domain antibody, whether it is in isolation, within a dAb construct or an antibody, consists of four “framework” regions separated by three hypervariable or complementarity-determining regions (or CDRs). The extents of the framework regions and CDRs in variable domains have been defined (see Kabat et al., “Sequence of Proteins of Immunological Interest”, US Department of Health and Human Services). The sequences of the framework regions of different light and heavy chains are relatively conserved within a species. Framework residues form the scaffold that positions and supports the CDRs that in turn dictate the antigen specificity and binding capacity. The CDRs are primarily responsible for antigen binding. The CDRs of each heavy and light chain are typically referred to as CDR1, CDR2 and CDR3, numbered sequentially starting from the N-terminus and are also typically identified by the chain in which the particular CDR is located. Thus, a VL CDR1 is the CDR1 from the variable domain of the light chain.

[0048] As described in this invention, “framework variants” refers herein to variable domains or dAbs which differ in amino acid sequence from an unmodified variable domain or dAb by virtue of substitution of one or more amino acid residue(s) in the unmodified sequence. The present invention describes framework variants. The variants are within the framework regions regardless of how the framework regions and CDRs are defined. For example: whether the definition utilizes the sequence-based alignment of the Kabat convention, or the structural-based definition of Chothia, or the IMGT and AHo schemes that unify the alignment of antibody immunoglobulin domains with T-cell receptor domains (Kabat et al., 1983, Chothia and Lesk, 1987, Lefranc et al., 2003 and Honegger and Pluckthun, 2001). The amino acid residue numbering used to describe the present invention follows that defined by the Kabat convention.

[0049] As used herein, a “protein” and “polypeptide” are used interchangeably and include reference to a chain of amino acid residues.

[0050] The amino acids referred herein are described: Alanine (A), Arginine (R), Asparagine (N), Aspartic Acid (D), Cysteine (C), Glutamic Acid (E), Glutamine (Q), Glycine (G), Histidine (H), Isoleucine (I), Leucine (L), Lysine (K), Methionine (M), Phenylalanine (F), Proline (P), Serine (S), Threonine (T), Tryptophan (W), Tyrosine (Y) and Valine (V).

[0051] Amino acid “substitution” refers to the replacement of the original amino acid in the unmodified protein sequence by a second amino acid at the same position in the protein sequence. The framework variants of this invention are substitution variants. That is, the specific residue or amino acid, of the unmodified variable domain or dAb is replaced by one of the other nineteen naturally occurring amino acids. This substitution does not alter the length of the polypeptide or protein sequence. The variants described in this invention are not insertion or deletion variants where the length of the polypeptide may be altered.

[0052] A substitution is deemed to be “conservative” when the original amino acid and the second or replacement amino acid have similar chemical and/or physical properties (e.g., charge, structure, polarity, hydrophobicity, hydrophilicity). As such, conservative substitutions do not substantially alter the activity of the protein. Conservative substitutions providing functionally similar amino acids are well known in the art. The following classes each contain amino acids that are conservative substitutions for one another:

[0053] (1) A, G and S

[0054] (2) N, Q, S, T, Y, K, R, H, D and E

[0055] (3) Q, N

[0056] (4) D, E

[0057] (5) K, R, H

[0058] (6) A, V, L, I, P, F, W, M, C, G

[0059] (7) Y, F, W

[0060] (8) C, S and T.

[0061] A “robust” residue or position within a protein referred herein are those residues or positions that can be substituted into amino acids of more than one amino acid class as defined above as conservative amino acids and still retain function.

[0062] The term “hotspot” means a portion of the protein sequence of a CDR or of a framework region of a variable domain which is a site of increased variation. Although CDRs are themselves considered to be regions of hypervariability, it has been learned in the present invention that particular sites, or hotspots, can be located in the framework regions which undergo certain substitution mutations.

[0063] The improved dAbs of this invention are of an immunoglobulin variable light chain domain or VL. It is of the Vκ subclass. As the invention relates to substitution of amino acids in the framework regions of the dAb and it is the CDRs, not framework residues that comprise the antigen binding surface, the dAbs described in the invention may be broadly applied to VL dAbs of all antigen specificity. The antigen may be human or non-human, protein, nucleic acid, lipid or carbohydrate.

[0064] The improved dAbs of this invention are of a VL domain of the Vκ subclass. Immunoglobulin variable light chain domains may be of either Vκ or Vλ, subclass. It is within the scope of the present invention that the improved dAbs may be also applicable in a VL dAb of lambda subclass.

[0065] The improved dAbs provided in this present invention are human dAbs. That is, the sequence of the unmodified dAb is one of a human light chain variable domain. The improved dAbs may also be applied to a humanized dAb, a CDR-grafted dAb, a synhumanised dAb, a primatized dAb, a camelid derived antibody fragment and variants thereof.

[0066] The improved dAb variants of this present invention may be utilized in isolation or be attached to other domains, e.g. comprising only a part of the protein. In a preferred embodiment of the present invention, the improved dAb is attached to a human or non-human primate heavy chain immunoglobulin constant region. The human or non-human primate heavy chain constant region may be selected from a group consisting of IgG1, IgG2, IgG3, IgG4, IgM, IgE and IgA (as well as subtypes thereof).

[0067] The improved dAb may be attached to other domains. The other attached domains may be antibody-based or antibody-like domains, such as another dAb, Fab fragments, scFv domains, VHH or V-NAR domains derived from camels, sharks and some fishes. The other domains may be non-antibody protein domains with a natural or artificially binding specificity. Naturally occurring protein domains with natural binding specificities that may be attached to the improved dAb include extracellular domains of receptors, such as those of the TNF receptor superfamily e.g. TNFRI (p55), TNFRII (p75), 95, DCR1, DCR2, DR3, DR4, DR5, DR6, EDAR, NGFR, RANK, LTβR, FN14, HVEM, CD27, CD30, CD40, 4-1BB, OX40, GITR, BCMA, TACI, BAFFR, XEDAR, TROY, RELT and soluble receptors such as osteoprotegerin and DCR3. Further others include growth hormones, glucagon-like peptide (GLP-1), interleukins (IL-2, -4, -5, -6, -7, -10, -12, -13, -14, -15, -16, -18, -21, -23, -31), FGF-basic, IGF-1, keratinocyte growth factor, insulin, LIF, GM-CSF, G-CSF, M-CSF, Epo and TPO, lymphotoxin, TRAIL, TGF-β, VEGF-2, leptin, interferons (IFN-α, -β and -γ), parathyroid hormone, Dornase alfa, TACE, thrombin, PDZ modules of signalling proteins, adhesion molecules and enzymes. Protein domains with artificially derived binding specificities include scaffolds based on transferrin (Transbody; WO 08/072,075A2), three-helix bundle from Z-domain of Protein A (Affibody®; WO 00/63243A1), human C-type lectin domain (Tetranectin; WO 98/56906A1), tenth fibronectin type III domain (AdNectin™; U.S. Pat. No. 6,818,418), Kunitz-type domain of trypsin inhibitor (WO 96/04378A2), ankyrin repeat protein, lipocalins (Anticalin®; WO 99/16873A1), 7-crystallin or ubiquitin molecule (Affilin™; WO 06/040129A2), trypsin inhibitor II (Microbody) and immunoglobulin-like domain derived from cytotoxic T lymphocyte-associated antigen 4 (CTLA-4), or modified variants thereof (Evibody™; U.S. Pat. No. 7,166,697). Further, attaching more than one domain together in a polypeptide can be achieved using linker polypeptides comprise two or more amino acid residues. Such linker polypeptides are well known in the art (see Holliger et al., 1993).

[0068] In another aspect, the improved dAbs may be conjugated to a protein such as serum albumin or a polymer (e.g. PEG). Alternatively, the dAbs may be immunoconjugated in which there is a covalent linkage of a therapeutic agent and can include cytotoxins such as native or modified Pseudomonas or Diphtheria toxin, calicheamicin and the like, encapsulating agents, (e.g. liposomes) which themselves contain pharmacological compositions, radioactive agents and other labels (e.g. enzyme reporter).

[0069] The invention relates to the specific amino acid substitution in a dAb that endows the dAb construct with improved function. The methods used to produce these mutations are wide and varied. The method utilized in the present embodiment is one of many routes that can be taken. In the case whereby the substitution(s) encompassed by the improved dAbs of this present invention are to be directly incorporated into a given human variable domain or domain antibody. The substitution may be introduced directly using standard techniques of molecular biology to prepare such DNA sequences. Substitution by site-directed mutagenesis and polymerase chain reaction (PCR) techniques is well known in the art. For example oligonucleotide directed synthesis such as that using a pre-existing variable region may be used (Jones et al., 1986, Verhoeyen et al., 1988 and Riechmann et al., 1988). Enzymatic filling of gapped nucleotide using T4 DNA polymerase may be employed (Queen et al., 1989 and WO 90/07861). This methodology will generate a small number of variants. To further increase the number of variants that can be produced at one time, one may utilize error-prone PCR to create a small library of substitution variants (Cadwell and Joyce, 1992, Hawkins et al., 1992, Fromant et al., 1995). Methods for generating high diversity libraries include DNA shuffling where recombination can be performed between variable genes or alternatively between variable gene libraries

[0070] (Stemmer et al., 1994, Harayama, 1998, Zha et al., 2003). Chain shuffling is an alternative method which involves the sequential replacement of the variable heavy and light chains (Kang et al., 1991b and Marks, 2004). In the case where large libraries of dAbs are employed for selection against a given target, natural libraries that use rearranged variable genes can be harvested from human B cells (Marks et al., 1991 and Vaughan et al., 1996) or synthetic libraries prepared from oligonucleotide cloning human immunoglobulin variable genes (Hoogenboom and Winter 1992, Barbas et al., 1992, Nissim et al., 1994, Griffiths et al., 1994 and de Kruif et al., 1995) including semi-synthetic libraries (Knappick et al., 2000).

[0071] The improved dAbs of the present invention may be identified by affinity maturation techniques. It is expected that those of skill in the art are knowledgeable in the numerous molecular engineering approaches and methods used to affinity mature antibodies and antibody-based fragments such as dAbs, Fabs, scFv and variations thereof. Typically, the CDRs are targeted in random mutagenesis (Jackson et al., 1995, van den Beucken et al., 2003, Zahnd et al., 2004, Lee et al., 2004, Yau et al., 2005) or targeted mutagenesis (Yelton et al., 1995, Schier et al., 1996, Thompson et al., 1996, Boder et al., 2005, Ho et al., 2005, Yoon et al., 2006). An example of targeted mutagenesis methodology is CDR walking involving a two-step process in which individual CDRs of the light and heavy chain are sequentially modified and the best candidates subsequently combined (Yang et al., 1995, Wu et al., 1998). Alternatively, mutations can be made across the entire sequence, for example to identify CDR and framework hotspots. This can be achieved by in vitro DNA amplification such as error-prone PCR (van den Beucken et al., 2003, Zhang et al., 2005, Thom et al., 2006, Finlay et al., 2009) or in vivo propagation of antibody genes within mutator bacterial strains (Irving et al., 1996 and Low et al., 1996, Coia et al., 2001). Targeting specific or hotspot residues for improvement can be determined experimentally using such techniques as alanine scanning (Cunnigham and Wells, 1989, Ashkenazi et al., 1990, Chatellier et al., 1995, Weiss et al., 2000, Koide et al., 2007) or homolog shotgun scanning (Vajdos et al., 2002, Murase et al., 2003, Pal et al., 2005) where the role of side chain functional groups at specific positions are identified.

[0072] When the three-dimensional structure of an antibody: antigen complex is available (e.g. obtained by x-ray crystallography), the molecular interactions between amino acids can facilitate the selection of amino acid residues for mutation. It is known that amino acid substitutions can change the three-dimensional structure of an antibody to improve function (Kast and Hilvert, 1997, Chen et al., 1999, Valjakka et al., 2002, Barderas et al., 2008). Three-dimensional models of antibodies and fragments thereof, such as domain antibodies described in this present invention, are commonly available and are familiar to those skilled in the art. Computer programs are available which illustrate and display probable three-dimensional conformational structures of selected candidate sequences. Inspection of these displays permits analysis of the likely role residues play in the recognition of the target antigen.

[0073] The improved dAbs may also be produced and selected against the target antigen using display techniques that are known to those skilled in the art. For example, bacteriophage lambda expression systems may be screened directly as bacteriophage plaques or as colonies of lysogens (Huse et al., 1989, Caton and Koprowski, 1990, Mullinax et al., 1990, Persson et al., 1991), or more commonly utilized, are selection display systems that enable a nucleic acid to be linked to the polypeptide it expresses. One of these methods is phage display techniques in which diverse protein sequences are displayed on the surface of filamentous bacteriophage, typically as fusions to bacteriophage coat proteins, or displayed externally on lambda phage capsids (phagebodies). Methods to undertake these processes are well known in the art (Scott and Smith, 1990, McCafferty et al., 1991, WO 92/01047, Kang et al., 1991a, Clackson et al., 1991, Lowman et al., 1991, Burton et al., 1991, Hoogenboom et al., 1991, Chang et al., 1991, Breitling et al., 1991, Marks et al., 1991, Barbas et al., 1992, Hawkins and Winter 1992, Marks et al., 1992, Lerner et al., 1992). Other systems for generating libraries of polypeptides involve the use of cell-free enzymatic machinery for the in vitro synthesis of the library members. For example, RNA display (Tuerk and Gold 1990, Ellington and Szostak, 1990), in vitro translation in stabilized polysome complexes (WO88/08453, WO90/05785), or in microcapsules formed by water-in-oil emulsions (WO99/02671, Tawfik and Griffiths, 1998).

[0074] The improved dAbs of this present invention may be characterized in a number of ways. One skilled in the art will appreciate the plethora of methods available. Some examples include, but are not limited to, attaching the antigen to a solid support (e.g. using an enzyme-linked immunoassay or by surface plasmon resonance analysis), in solution utilizing a labelling agent (e.g biotinylation, radiolabelling or fluorescent tagging) and employing depletion or subtraction procedures (e.g. FACS analysis; Daugherty et al., 1998, Ridgway et al., 1999, van den Beucken et al., 2003).

[0075] In another aspect, an assay for the activity or function of the target antigen may be assayed or quantified as a measurable activity or function of the target antigen. An assay for the activity or function of a target antigen includes for example, binding activity, cell activation, cell killing, cell proliferation, cell signalling, enzymatic activity, ligand-dependent internalization, promotion of cell survival and gene expression. The present invention describes framework variants that target the antigen TNFα; activity can be assayed using the TNFα-mediated cytotoxicity of L929 cells.

[0076] The term “neutralization” when used in reference to a molecule, means that the molecule interferes with a measurable activity or function of the target antigen. A molecule is neutralizing if it reduces a measurable activity or function of the target antigen. In several aspects of the present invention, where the target antigen is TNFα, neutralizing activity can be assessed using the L929 cytotoxicity assay. For example, murine L929 cells are susceptible to the cytotoxic effects of human TNFα in a dose-dependent manner. The ability to inhibit or block TNFα can be quantitated by the neutralization of the TNFα-mediated cytotoxicity of L929 cells. This ability to inhibit TNFα, or the activity as a TNFα inhibitor, is referred to as “potency”, such that the activity or potency of the improved dAbs of this invention refers to its ability to inhibit effects of TNFα in this assay.

[0077] Binding activity of the dAbs of this current invention for target antigen may be measured in a number of different assays. Such binding assays are well-known to those skilled in the art. These include enzyme-linked immunosorbent assay (ELISA) and analysis by surface plasmon resonance (SPR). Binding assays enable the measurement of the strength of the interaction between the two said molecules.

[0078] The term “dissociation constant” or “KD” refers to the strength of the interaction between two molecules, and in this invention, the affinity of dAb or dAb variant for its target antigen. The “KD” is the dissociation constant at equilibrium, and has units of Molarity. The affinity of an antibody or dAb for an antigen can be determined experimentally using any suitable method (eg. Berzofsky et al., 1984 and Kuby, 1992; and methods described herein).

[0079] As used herein “nucleic acid” or “nucleic acid molecule” includes reference to a deoxyribonucleotide or ribonucleotide polymer in either single-, double-, triple-stranded or any combination thereof. Nucleic acid molecules of the present invention can be in the form of RNA, such as mRNA, hnRNA, tRNA or any other form, or in the form of DNA, including, but not limited to, cDNA and genomic DNA obtained by cloning or produced synthetically, or any combinations thereof. Nucleic acid molecules of the present invention can include nucleic acid molecules comprising the coding sequence for a dAb, or dAb variant or specified portion; and nucleic acid molecules which comprise a nucleotide sequence different from those described above but which, due to the degeneracy of the genetic code, still encode at least one dAb or dAb variant as described herein and/or as known in the art. The genetic code is well known in the art. Thus, it would be routine for one skilled in the art to generate such degenerate nucleic acid variants that code for specific dAb or dAb variants or specified portion of the present invention.

[0080] By “transformed cell” is meant a cell that comprises the nucleic acid molecule of this present invention. Transformed cells may be prokaryotic cells such as E. coli or eukaryotic cells such as yeast or mammalian cells. The transformed cells themselves may be used therapeutically as described in US 2005/0101005 and WO 2000/023471, the disclosures of which are incorporated herein by reference.

[0081] Further, the transformed cell may be utilized in the production of the dAb or dAb variant Fc protein of the present invention. In such case, a suitable host cell system may be used for expression of the DNA sequences encoding for the improved dAbs. These may be bacteria, plant, yeast, insect and mammalian cells. It is expected that those of skill in the art are knowledgeable in the numerous expression systems for the expression of proteins including E. coli and other bacterial hosts and suitable mammalian host cells including COS-1 (e.g. ATCC CRL 1650), COS-7 (e.g. ATCC CRL-1651), HEK293, BHK21 (e.g. ATCC CRL-10), CHO (e.g. ATCC CRL 1610). BSC-1 (e.g. ATCC CRL-26) SP2/0-Ag14 (e.g. ATCC CRL 1851), HepG2 cells, YB2/0 cells, NS0, Per.C6, EBx, HeLa cells and the like, which are readily available from, for example, American Type Culture Collection (ATCC; Manassas, Va. Usa.)

[0082] Alternatively, nucleic acids of the present invention can be expressed in a host cell by turning on (by manipulation) in a host cell that contains endogenous DNA encoding an domain antibody or specified portion or variant of the present invention. Such methods are well known in the art, e.g., as described in U.S. Pat. Nos. 5,580,734, 5,641,670, 5,733,746, and 5,733,761, entirely incorporated herein by reference.

[0083] The present invention also provides a composition comprising the dAb of the present invention together with a pharmaceutically acceptable carrier.

[0084] The present invention also provides a method of treating a disorder characterized by human TNFα activity in a human subject comprising administering to the subject an effective amount of the dAb of the present invention or a composition containing such a dAb or dAb construct.

[0085] Typically the disorder characterized by human TNFα activity is selected from the group consisting of inflammation; inflammatory diseases; sepsis, including septic shock, endotoxic shock, gram negative sepsis and toxic shock syndrome; autoimmune disease, including rheumatoid arthritis, juvenile arthritis, rheumatoid spondylitis, ankylosing spondylitis, Sjögren's syndrome, osteoarthritis and gouty arthritis, allergy, multiple sclerosis, autoimmune diabetes, autoimmune uveitis, psoriasis, pemphigoid and nephrotic syndrome; inflammatory conditions of the eye, including macular degeneration, angiogenesis-related ocular disorder (in particular age-related macular degeneration), uveitis, Behçet's disease; infectious disease, including fever and myalgias due to infection and cachexia secondary to infection; graft versus host disease; tumour growth or metastasis, hematologic malignancies; pulmonary disorders including asthma, adult respiratory distress syndrome, shock lung, chronic pulmonary inflammatory disease, pulmonary sarcoidosis, pulmonary fibrosis and silicosis; inflammatory bowel disorders including Crohn's disease and ulcerative colitis; cardiac disorders, congestive heart failure; vascular disorders including Wegener's disease, giant cell arteritis; inflammatory bone disorders, central nervous system disorders such as Alzheimer's disease; peripheral nervous system disorders such as sciatica, hepatitis, coagulation disturbances, burns, reperfusion injury, endometriosis, keloid formation and scar tissue formation.

[0086] The route of administration may be intravenous, intramuscular, bolus, intraperitoneal, subcutaneous, respiratory, inhalation, topical, nasal, vaginal, rectal, buccal, sublingual, intranasal, subdermal, and transdermal.

[0087] Typically, treatment of pathologic conditions is effected by administering an effective amount or dosage of at least one dAb composition that total, on average, a range from at least about 0.01 to 500 milligrams of at least one dAb, specified portion or variant/kilogram of patient per dose, and, preferably, from at least about 0.1 to 100 milligrams of dAb, specified portion or variant/kilogram of patient per single or multiple administration, depending upon the specific activity of dAb, specified portion or variant contained in the composition. Alternatively, the effective serum concentration can comprise 0.1-5000 μg/ml serum concentration per single or multiple administrations. Suitable dosages are known to medical practitioners and will, of course, depend upon the particular disease state, specific activity of the composition being administered, and the particular patient undergoing treatment. In some instances, to achieve the desired therapeutic amount, it can be necessary to provide for repeated administration, i.e., repeated individual administrations of a particular monitored or metered dose, where the individual administrations are repeated until the desired daily dose or effect is achieved. Preferred doses can optionally include 0.1, 0.2, 0.3, 0.4, 0.5, 0.6, 0.7, 0.8, 0.9, 1, 2, 3, 4, 5, 6, 7, 8, 9, 10, 11, 12, 13, 14, 15, 16, 17, 18, 19, 20, 21, 22, 23, 24, 25, 26, 27, 28, 29, 30, 31, 32, 33, 34, 35, 36, 37, 38, 39, 40, 41, 42, 43, 44, 45, 46, 47, 48, 49, 50, 51, 52, 53, 54, 55, 56, 57, 58, 59, 60, 62, 63, 64, 65, 66, 67, 68, 69, 70, 71, 72, 73, 74, 75, 76, 77, 78, 79, 80, 81, 82, 83, 84, 85, 86, 87, 88, 89, 90, 91, 92, 93, 94, 95, 96, 97, 98, 99 and/or 100 mg/kg/administration, or any range, value or fraction thereof, or to achieve a serum concentration of 0.1, 0.5, 0.9, 1.0, 1.1, 1.2, 1.5, 1.9, 2.0, 2.5, 2.9, 3.0, 3.5, 3.9, 4.0, 4.5, 4.9, 5.0, 5.5, 5.9, 6.0, 6.5, 6.9, 7.0, 7.5, 7.9, 8.0, 8.5, 8.9, 9.0, 9.5, 9.9, 10, 10.5, 10.9, 11, 11.5, 11.9, 20, 12.5, 12.9, 13.0, 13.5, 13.9, 14.0, 14.5, 4.9, 5.0, 5.5, 5.9, 6.0, 6.5, 6.9, 7.0, 7.5, 7.9, 8.0, 8.5, 8.9, 9.0, 9.5, 9.9, 10, 10.5, 10.9, 11, 11.5, 11.9, 12, 12.5, 12.9, 13.0, 13.5, 13.9, 14, 14.5, 15, 15.5, 15.9, 16, 16.5, 16.9, 17, 17.5, 17.9, 18, 18.5, 18.9, 19, 19.5, 19.9, 20, 20.5, 20.9, 21, 22, 23, 24, 25, 26, 27, 28, 29, 30, 35, 40, 45, 50, 55, 60, 65, 70, 75, 80, 85, 90, 96, 100, 200, 300, 400, 500, 600, 700, 800, 900, 1000, 1500, 2000, 2500, 3000, 3500, 4000, 4500, and/or 5000 μg/ml serum concentration per single or multiple administration, or any range, value or fraction thereof.

[0088] Alternatively, the dosage administered can vary depending upon known factors, such as the pharmacodynamic characteristics of the particular agent, and its mode and route of administration; age, health, and weight of the recipient; nature and extent of symptoms, kind of concurrent treatment, frequency of treatment, and the effect desired. Usually, a dosage of active ingredient can be about 0.1 to 100 mg/kg of body weight. Ordinarily, 0.1 to 50, and, preferably, 0.1 to 10 mg/kg per administration or in sustained release form is effective to obtain desired results.

[0089] As a non-limiting example, treatment of humans or animals can be provided as a one-time or periodic dosage of at least one dAb, specified portion or variant of the present invention, 0.1 to 100 mg/kg, such as 0.5, 0.9, 1.0, 1.1, 1.5, 2, 3, 4, 5, 6, 7, 8, 9, 10, 11, 12, 13, 14, 15, 16, 17, 18, 19, 20, 21, 22, 23, 24, 25, 26, 27, 28, 29, 30, 40, 45, 50, 60, 70, 80, 90 or 100 mg/kg, per day, on at least one of day 1, 2, 3, 4, 5, 6, 7, 8, 9, 10, 11, 12, 13, 14, 15, 16, 17, 18, 19, 20, 21, 22, 23, 24, 25, 26, 27, 28, 29, 30, 31, 32, 33, 34, 35, 36, 37, 38, 39, or 40, or, alternatively or additionally, at least one of week 1, 2, 3, 4, 5, 6, 7, 8, 9, 10, 11, 12, 13, 14, 15, 16, 17, 18, 19, 20, 21, 22, 23, 24, 25, 26, 27, 28, 29, 30, 31, 32, 33, 34, 35, 36, 37, 38, 39, 40, 41, 42, 43, 44, 45, 46, 47, 48, 49, 50, 51, or 52, or, alternatively or additionally, at least one of 1, 2, 3, 4, 5, 6, 7, 8, 9, 10, 11, 12, 13, 14, 15, 16, 17, 18, 19, or years, or any combination thereof, using single, infusion or repeated doses.

[0090] Dosage forms (composition) suitable for internal administration generally contain from about 0.1 milligram to about 500 milligrams of active ingredient per unit or container. In these pharmaceutical compositions, the active ingredient will ordinarily be present in an amount of about 0.5-99.999% by weight based on the total weight of the composition.

[0091] For parenteral administration, the dAb, specified portion or variant can be formulated as a solution, suspension, emulsion or lyophilized powder in association, or separately provided, with a pharmaceutically acceptable parenteral vehicle. Examples of such vehicles are water, saline, Ringer's solution, dextrose solution, and 1-10% human serum albumin. Liposomes and nonaqueous vehicles, such as fixed oils, may also be used. The vehicle or lyophilised powder may contain additives that maintain isotonicity (e.g., sodium chloride, mannitol) and chemical stability (e.g., buffers and preservatives). The formulation is sterilized by known or suitable techniques.

[0092] Suitable pharmaceutical carriers are described in the most recent edition of Remington's Pharmaceutical Sciences, A. Osol, a standard reference text in this field.

[0093] Domain antibodies of the present invention can be delivered in a carrier, as a solution, emulsion, colloid, or suspension, or as a dry powder, using any of a variety of devices and methods suitable for administration by inhalation or other modes described herein or known in the art.

[0094] Formulations for parenteral administration can contain as common excipients sterile water or saline, polyalkylene glycols, such as polyethylene glycol, oils of vegetable origin, hydrogenated naphthalenes and the like. Aqueous or oily suspensions for injection can be prepared by using an appropriate emulsifier or humidifier and a suspending agent, according to known methods. Agents for injection can be a non-toxic, non-orally administrable diluting agent, such as aqueous solution or a sterile injectable solution or suspension in a solvent. As the usable vehicle or solvent, water, Ringer's solution, isotonic saline, etc. are allowed; as an ordinary solvent, or suspending solvent, sterile involatile oil can be used. For these purposes, any kind of involatile oil and fatty acid can be used, including natural, synthetic or semisynthetic fatty oils or fatty acids; natural, synthetic or semisynthetic mono- or di- or tri-glycerides. Parenteral administration is known in the art and includes, but is not limited to, conventional means of injections, a gas pressured needle-less injection device as described in U.S. Pat. No. 5,851,198, and a laser perforator device as described in U.S. Pat. No. 5,839,446, entirely incorporated herein by reference.

[0095] The invention further relates to the administration of at least one dAb, specified portion or variant by parenteral, topical, subcutaneous, intramuscular, intravenous, intraarticular, intrabronchial, intraabdominal, intracapsular, intracartilaginous, intracavitary, intracelial, intracerebellar, intracerebroventricular, intracolic, intracervical, intragastric, intrahepatic, intramyocardial, intraosteal, intrapelvic, intrapericardiac, intraperitoneal, intrapleural, intraprostatic, intrapulmonary, intrarectal, intrarenal, intraretinal, intraspinal, intrasynovial, intrathoracic, intrauterine, intravesical, intralesional, bolus, vaginal, rectal, buccal, sublingual, intranasal, or transdermal means. An dAb, specified portion or variant compositions can be prepared for use for parenteral (subcutaneous, intramuscular, intravenous, intrarticular, etc.) administration particularly in the form of liquid solutions or suspensions; for use in topical, vaginal or rectal administration particularly in semisolid forms, such as creams and suppositories; for buccal, or sublingual administration particularly in the form of tablets or capsules; or intranasally particularly in the form of powders, nasal drops or aerosols or certain agents; or transdermally particularly in the form of a gel, ointment, lotion, suspension or patch delivery system with chemical enhancers, such as dimethyl sulfoxide, to either modify the skin structure or to increase the drug concentration in the transdermal patch (Junginger et al., In “Drug Permeation Enhancement”; Hsieh, D. S., Eds., pp. 59-90 (Marcel Dekker, Inc. New York 1994, entirely incorporated herein by reference), or with oxidising agents that enable the application of formulations containing proteins and peptides onto the skin (WO 98/53847), or applications of electric fields to create transient transport pathways, such as electroporation, or to increase the mobility of charged drugs through the skin such as iontophoresis, or application of ultrasound, such as sonophoresis (U.S. Pat. Nos. 4,309,989 and 4,767,402; the above publications and patents being entirely incorporated herein by reference).

[0096] For pulmonary administration, preferably, at least one dAb, specified portion or variant composition is delivered in a particle size effective for reaching the lower airways of the lung or sinuses. According to the invention, at least one dAb, specified portion or variant can be delivered by any of a variety of inhalation or nasal devices known in the art for administration of a therapeutic agent by inhalation. These devices capable of depositing aerosolised formulations in the sinus cavity or alveoli of a patient include metered dose inhalers, nebulisers, dry powder generators, sprayers, and the like. Other devices suitable for directing the pulmonary or nasal administration of a dAb, specified portion or variants thereof are also known in the art. All such devices can use formulations suitable for the administration for the dispensing of a dAb, specified portion or variant in an aerosol. Such aerosols can be comprised of either solutions (both aqueous and non aqueous) or solid particles. Metered dose inhalers like the Ventolin® metered dose inhaler, typically use a propellent gas and require actuation during inspiration (See, e.g., WO 94/16970, WO 98/35888). Dry powder inhalers like Turbuhaler™ (Astra), Rotahaler® (Glaxo), Diskus® (Glaxo), Spiros™ inhaler (Dura), devices marketed by Inhale Therapeutics, and the Spinhaler® powder inhaler (Fisons), use breath-actuation of a mixed powder (U.S. Pat. No. 4,668,218 Astra, EP 237507 Astra, WO 97/25086 Glaxo, WO 94/08552 Dura, U.S. Pat. No. 5,458,135 Inhale, WO 94/06498 Fisons, entirely incorporated herein by reference). Nebulisers like AERx™ Aradigm, the Ultravent® nebuliser (Mallinckrodt), and the Acorn II® nebuliser (Marquest Medical Products; U.S. Pat. No. 5,404,871 Aradigm, WO 97/22376), the above references entirely incorporated herein by reference, produce aerosols from solutions, while metered dose inhalers, dry powder inhalers, etc. generate small particle aerosols. These specific examples of commercially available inhalation devices are intended to be representative of specific devices suitable for the practice of this invention, and are not intended as limiting the scope of the invention. Preferably, a composition comprising at least one dAb or specified portion or variant is delivered by a dry powder inhaler or a sprayer. There are several desirable features of an inhalation device for administering at least one dAb, specified portion or variant of the present invention. For example, delivery by the inhalation device is advantageously reliable, reproducible, and accurate. The inhalation device can optionally deliver small dry particles, e.g. less than about 10 μm, preferably about 1-5 μm, for good respirability.

[0097] Formulations for oral administration of at least one dAb, specified portion or variant, rely on the co-administration of adjuvants (e.g., resorcinols and nonionic surfactants, such as polyoxyethylene oleyl ether and n-hexadecylpolyethylene ether) to increase artificially the permeability of the intestinal walls, as well as the co-administration of enzymatic inhibitors (e.g., pancreatic trypsin inhibitors, diisopropylfluorophosphate (DFF) and trasylol) to inhibit enzymatic degradation. The active constituent compound of the solid-type dosage form for oral administration can be mixed with at least one additive, including sucrose, lactose, cellulose, mannitol, trehalose, raffinose, maltitol, dextran, starches, agar, arginates, chitins, chitosans, pectins, gum tragacanth, gum arabic, gelatin, collagen, casein, albumin, synthetic or semisynthetic polymer, and glyceride. These dosage forms can also contain other type(s) of additives, e.g., inactive diluting agent, lubricant, such as magnesium stearate, paraben, preserving agent, such as sorbic acid, ascorbic acid, α-tocopherol, antioxidant, such as cysteine, disintegrator, binder, thickener, buffering agent, sweetening agent, flavoring agent, perfuming agent, etc.

[0098] Tablets and pills can be further processed into enteric-coated preparations. The liquid preparations for oral administration include emulsion, syrup, elixir, suspension and solution preparations allowable for medical use. These preparations may contain inactive diluting agents ordinarily used in said field, e.g., water. Liposomes have also been described as drug delivery systems for insulin and heparin (U.S. Pat. No. 4,239,754). More recently, microspheres of artificial polymers of mixed amino acids (proteinoids) have been used to deliver pharmaceuticals (U.S. Pat. No. 4,925,673). Furthermore, carrier compounds described in U.S. Pat. Nos. 5,879,681 and 5,871,753 are used to deliver biologically active agents orally and are known in the art.

[0099] For absorption through mucosal surfaces, compositions and methods of administering at least one dAb, specified portion or variant include an emulsion comprising a plurality of submicron particles, a mucoadhesive macromolecule, a bioactive peptide, and an aqueous continuous phase, which promotes absorption through mucosal surfaces by achieving mucoadhesion of the emulsion particles (U.S. Pat. No. 5,514,670). Mucus surfaces suitable for application of the emulsions of the present invention can include corneal, conjunctival, buccal, sublingual, nasal, vaginal, pulmonary, stomachic, intestinal, and rectal routes of administration. Formulations for vaginal or rectal administration, e.g. suppositories, can contain as excipients, for example, polyalkyleneglycols, vaseline, cocoa butter, and the like. Formulations for intranasal administration can be solid and contain as excipients, for example, lactose or can be aqueous or oily solutions of nasal drops. For buccal administration, excipients include sugars, calcium stearate, magnesium stearate, pregelinatined starch, and the like (U.S. Pat. No. 5,849,695).

[0100] For transdermal administration, the at least one dAb, specified portion or variant is encapsulated in a delivery device, such as liposomes or polymeric nanoparticles, microparticles, microcapsules, or microspheres (referred to collectively as microparticles unless otherwise stated). A number of suitable devices are known, including microparticles made of synthetic polymers, such as polyhydroxy acids, such as polylactic acid, polyglycolic acid and copolymers thereof, polyorthoesters, polyanhydrides, and polyphosphazenes, and natural polymers, such as collagen, polyamino acids, albumin and other proteins, alginate and other polysaccharides, and combinations thereof (U.S. Pat. No. 5,814,599).

[0101] It can be sometimes desirable to deliver the domain antibodies of the present invention to the subject over prolonged periods of time, for example, for periods of one week to one year from a single administration. Various slow release, depot or implant dosage forms can be utilised. For example, a dosage form can contain a pharmaceutically acceptable non-toxic salt of the compounds that has a low degree of solubility in body fluids, for example, (a) an acid addition salt with a polybasic acid, such as phosphoric acid, sulfuric acid, citric acid, tartaric acid, tannic acid, pamoic acid, alginic acid, polyglutamic acid, naphthalene mono- or di-sulfonic acids, polygalacturonic acid, and the like; (b) a salt with a polyvalent metal cation, such as zinc, calcium, bismuth, barium, magnesium, aluminium, copper, cobalt, nickel, cadmium and the like, or with an organic cation formed from e.g., N,N′-dibenzyl-ethylenediamine or ethylenediamine; or (c) combinations of (a) and (b) e.g., a zinc tannate salt. Additionally, the compounds of the present invention or, preferably, a relatively insoluble salt, such as those just described, can be formulated in a gel, for example, an aluminium monostearate gel with, e.g. sesame oil, suitable for injection. Particularly preferred salts are zinc salts, zinc tannate salts, pamoate salts, and the like. Another type of slow release depot formulation for injection would contain the compound or salt dispersed for encapsulation in a slow degrading, non-toxic, non-antigenic polymer, such as a polylactic acid/polyglycolic acid polymer, for example, as described in U.S. Pat. No. 3,773,919. The compounds or, preferably, relatively insoluble salts, such as those described above, can also be formulated in cholesterol matrix silastic pellets, particularly for use in animals. Additional slow release, depot or implant formulations, e.g., gas or liquid liposomes, are known in the literature (U.S. Pat. No. 5,770,222 and Robinson Ed., 1978).

[0102] All scientific citations, patents, patent applications and manufacturer's technical specifications referred to hereinafter are incorporated herein by reference in their entirety.

[0103] Throughout this specification, unless the context requires otherwise, the word “comprise”, or variations such as “comprises” or “comprising”, will be understood to imply the inclusion of a stated element or integer or group of elements or integers but not the exclusion of any other element or integer or group of elements or integers.

[0104] It is to be understood that unless otherwise indicated, the subject invention is not limited to specific formulation components, manufacturing methods, dosage regimens, or the like, as such may vary. It is also to be understood that the terminology used herein is for the purpose of describing particular embodiments only and is not intended to be limiting.

[0105] It must be noted that, as used in the subject specification, the singular forms “a”, “an” and “the” include plural aspects unless the context clearly dictates otherwise. Thus, for example, reference to “a target” includes a single target, as well as two or more targets; reference to “an oligodendrocyte” includes a single oligodendrocyte, as well as two or more oligodendrocytes; reference to “the formulation” includes a single formulation, as well as two or more formulations; and so forth.

[0106] The present invention is further described by the following non-limiting Examples.

### Example 1

### Identification of Key Framework Variants

### Design of the Framework Variants

[0107] A directed mutagenesis approach was taken in order to identify key framework residues in a domain antibody construct that improved its function. Protein functions that were improved were neutralization potency, antigen binding efficiency and/or expression levels.

[0108] The unmodified domain antibody construct comprises a variable light (VL) domain antibody (dAb) targeted to human TNFα, a modified hinge region and the heavy chain constant region of human IgG1 but wherein the constant region has a truncated CH1 domain (WO 2007/087673). The unmodified dAb construct will herein be referred to as ‘TNFα dAb Fc’. TNFα dAb Fc has the sequence of SEQ. ID. NO. 2

[0109] Complementarity-determining regions (CDRs) and framework residues of the VL domain of the domain antibody Fc construct, or TNFα dAb Fc, were identified using definitions and consensus sequences of the Kabat convention (Kabat et al., “Sequence of Proteins of Immunological Interest”, US Department of Health and Human Services).

[0110] Single substitution mutations were made to the framework regions of the VL domain of TNFα dAb Fc construct. Each ‘wild-type’ residue was substituted to one of nine amino acids. The selected amino acids are representative of the major side-chain chemistries provided by the twenty amino acids. The nine amino acids and their type of side-chain functionality are:

[0111] alanine (A), small;

[0112] serine (S) and histidine (H), nucleophilic;

[0113] glutamine (Q), amide;

[0114] aspartic acid (D), acidic;

[0115] lysine (K), basic;

[0116] leucine (L) and proline (P), hydrophobic; and

[0117] tyrosine (Y), aromatic.

[0118] Residues within and some immediately adjacent to the CDRs of the VL domain were not mutated. In cases where the wild-type residue is one of the nine representative amino acids, then substitutions into the remaining eight residues were made. In total, 78 framework residues were mutated and 640 variants containing single substitution mutations were generated in VL domains of the TNFα dAb Fc construct.

[0119] The gene fragments encoding the variants were optimized for expression in mammalian cells. They were assembled from synthetic oligonucleotides and/or PCR products and cloned into a vector suitable for mammalian cell expression. The final DNA constructs were verified by sequencing.

### First Round Screen Using TNFα Binding ELISA

[0120] The framework variants containing single substitution mutations, as well as the unmodified TNFα dAb Fc construct, were assessed for their ability to bind to target antigen, human TNFα, in a TNFα binding ELISA.

[0121] The variants were transiently expressed using suspension variant of the CHOK1 cell line. In this example, small-scale transient transfections were performed using the Freestyle™ MAX CHO transfection method (Invitrogen; 2 ml transfections in 24-well plate format). Six days after transfection, conditioned medium of transfected cells was harvested by centrifugation and tested in the following ELISA.

### TNFα Binding ELISA

[0122] Ninety-six well flat-bottom plates (MaxiSorp™, Nunc™) were coated with recombinant human TNFα (CytoLab; 1 μg/ml) in carbonate coating buffer (35 mM sodium carbonate, 15 mM sodium hydrogen carbonate, pH 9.6) overnight at 4° C. The plates were washed three times in PBS containing 0.05% Tween-20 (PBS-T) then PBS. The plates were incubated in blocking solution (1% w/v BSA diluted in PBS) for 2 hours at room temperature. After washing three times in PBS-T and PBS, 50 μl of the conditioned medium and 50 μl of diluent buffer (1% w/v BSA diluted in PBS) was added to the wells and incubated for 2 hours at room temperature. The plates were washed three times in PBS-T and PBS then incubated with secondary antibody HRP goat anti-human IgG (H+L; Zymed®, diluted 1:2000 with diluent buffer). After one hour incubation at room temperature, plates were washed three times as above then 100 μl of 3,3′,5,5′tetramethylbenzidine (TMB; Sigma Aldrich®) solution added to the wells. Colorimetric development was performed at room temperature and stopped with 50 μl of 1 M hydrochloric acid and absorbance read at 450 nm.

[0123] FIG. 1 is a representative graph of TNFα binding ELISA showing resultant binding of framework variants with substitutions at position forty-nine. Table 1 lists the ELISA results (A 450 nm values) for the 640 variants screened.

TABLE 1
TNFα binding ELISA data of the 640 single substitution
TNFα dAb framework variants.

| TNFα dAb | |
|---|---|
| variants | A₄₅₀ (AU) |
| D1A | 0.978 |
| D1S | 0.738 |
| D1L | 0.762 |
| D1Y | 0.971 |
| D1Q | 0.683 |
| D1H | 0.740 |
| D1P | 0.496 |
| D1K | 0.875 |
| I2A | 0.917 |
| I2S | 0.549 |
| I2L | 0.751 |
| I2Y | 0.876 |
| I2D | 0.616 |
| I2Q | 0.459 |
| I2H | 0.531 |
| I2P | 0.655 |
| I2K | 0.550 |
| Q3A | 1.057 |
| Q3S | 0.664 |
| Q3L | 0.610 |
| Q3Y | 0.963 |
| Q3D | 0.709 |
| Q3H | 0.692 |
| Q3P | 0.375 |
| Q3K | 0.589 |
| M4A | 0.289 |
| M4S | 0.230 |
| M4L | 0.731 |
| M4Y | 0.358 |
| M4D | 0.246 |
| M4Q | 0.335 |
| M4H | 0.335 |
| M4P | 0.296 |
| M4K | 0.410 |
| T5A | 0.973 |
| T5L | 0.661 |
| T5Y | 0.969 |
| T5D | 0.648 |
| T5Q | 0.685 |
| T5H | 0.703 |
| T5P | 0.333 |
| T5K | 0.643 |
| Q6A | 0.973 |
| Q6S | 0.544 |
| Q6L | 0.324 |
| Q6Y | 0.969 |
| Q6D | 0.252 |
| Q6H | 0.380 |
| Q6P | 0.262 |
| Q6K | 0.304 |
| S7A | 1.016 |
| S7L | 0.749 |
| S7Y | 0.975 |
| S7D | 0.872 |
| S7Q | 0.781 |
| S7H | 0.743 |
| S7P | 0.310 |
| S7K | 0.769 |
| P8A | 0.892 |
| P8S | 0.680 |
| P8L | 0.658 |
| P8Y | 0.694 |
| P8D | 0.564 |
| P8Q | 0.731 |
| P8H | 0.627 |
| P8K | 0.623 |
| S9A | 0.981 |
| S9L | 0.972 |
| S9Y | 0.769 |
| S9D | 0.973 |
| S9Q | 0.768 |
| S9H | 0.850 |
| S9P | 0.838 |
| S9K | 0.783 |
| S10A | 0.997 |
| S10L | 0.988 |
| S10Y | 0.795 |
| S10D | 0.813 |
| S10Q | 0.980 |
| S10H | 0.764 |
| S10P | 0.687 |
| S10K | 0.803 |
| L11A | 0.912 |
| L11S | 0.858 |
| L11Y | 0.708 |
| L11D | 0.299 |
| L11Q | 1.102 |
| L11H | 0.650 |
| L11P | 0.279 |
| L11K | 0.556 |
| S12A | 0.939 |
| S12L | 0.710 |
| S12Y | 0.704 |
| S12D | 0.636 |
| S12Q | 0.762 |
| S12H | 0.699 |
| S12P | 0.911 |
| S12K | 0.714 |
| A13S | 0.735 |
| A13L | 0.879 |
| A13Y | 0.628 |
| A13D | 0.229 |
| A13Q | 0.648 |
| A13H | 0.699 |
| A13P | 0.685 |
| A13K | 0.723 |
| S14A | 0.966 |
| S14L | 0.659 |
| S14Y | 0.937 |
| S14D | 0.787 |
| S14Q | 0.752 |
| S14H | 0.742 |
| S14P | 0.649 |
| S14K | 0.782 |
| V15A | 0.912 |
| V15S | 0.724 |
| V15Y | 0.737 |
| V15D | 0.561 |
| V15Q | 0.557 |
| V15H | 0.780 |
| V15P | 0.965 |
| V15K | 0.740 |
| G16S | 0.619 |
| G16L | 0.633 |
| G16Y | 0.942 |
| G16D | 0.542 |
| G16Q | 0.594 |
| G16H | 0.677 |
| G16P | 0.156 |
| G16K | 0.896 |
| D17A | 0.875 |
| D17S | 1.052 |
| D17L | 1.000 |
| D17Y | 1.083 |
| D17Q | 0.903 |
| D17H | 1.077 |
| D17P | 0.953 |
| D17K | 0.295 |
| R18A | 0.894 |
| R18S | 1.141 |
| R18L | 0.957 |
| R18Y | 0.900 |
| R18D | 0.984 |
| R18Q | 0.982 |
| R18H | 1.027 |
| R18P | 0.855 |
| R18K | 0.867 |
| V19A | 0.923 |
| V19S | 0.643 |
| V19Y | 0.254 |
| V19D | 0.157 |
| V19Q | 0.223 |
| V19H | 0.560 |
| V19P | 0.341 |
| V19K | 0.750 |
| T20A | 0.864 |
| T20L | 1.034 |
| T20Y | 1.119 |
| T20D | 1.043 |
| T20Q | 1.023 |
| T20H | 0.981 |
| T20P | 0.881 |
| T20K | 1.017 |
| I21A | 0.405 |
| I21S | 0.263 |
| I21L | 0.935 |
| I21Y | 0.191 |
| I21D | 0.165 |
| I21Q | 0.143 |
| I21H | 0.173 |
| I21P | 0.161 |
| I21K | 0.194 |
| T22A | 0.941 |
| T22L | 1.010 |
| T22Y | 1.036 |
| T22D | 0.985 |
| T22Q | 1.070 |
| T22H | 1.088 |
| T22P | 0.645 |
| T22K | 1.062 |
| Y36A | 0.185 |
| Y36S | 0.263 |
| Y36L | 0.237 |
| Y36D | 0.168 |
| Y36Q | 0.167 |
| Y36H | 0.149 |
| Y36P | 0.243 |
| Y36K | 0.378 |
| Q37A | 0.877 |
| Q37S | 0.962 |
| Q37L | 0.885 |
| Q37Y | 0.549 |
| Q37D | 0.251 |
| Q37H | 0.947 |
| Q37P | 0.294 |
| Q37K | 1.042 |
| Q38A | 0.783 |
| Q38S | 0.992 |
| Q38L | 0.649 |
| Q38Y | 0.793 |
| Q38D | 0.178 |
| Q38H | 1.101 |
| Q38P | 0.156 |
| Q38K | 0.909 |
| K39A | 0.802 |
| K39S | 1.004 |
| K39L | 1.056 |
| K39Y | 1.019 |
| K39D | 0.754 |
| K39Q | 0.982 |
| K39H | 1.062 |
| K39P | 0.949 |
| P40A | 0.901 |
| P40S | 1.031 |
| P40L | 1.003 |
| P40Y | 1.048 |
| P40D | 1.090 |
| P40Q | 1.053 |
| P40H | 0.990 |
| P40K | 1.041 |
| G41S | 1.062 |
| G41L | 0.906 |
| G41Y | 0.929 |
| G41D | 0.883 |
| G41Q | 1.066 |
| G41H | 0.925 |
| G41P | 0.966 |
| G41K | 0.877 |
| K42A | 0.872 |
| K42S | 1.092 |
| K42L | 0.816 |
| K42Y | 1.013 |
| K42D | 1.034 |
| K42Q | 0.903 |
| K42H | 1.074 |
| K42P | 0.246 |
| A43S | 0.831 |
| A43L | 0.718 |
| A43Y | 0.976 |
| A43D | 0.661 |
| A43Q | 1.051 |
| A43H | 1.018 |
| A43P | 0.825 |
| A43K | 1.024 |
| P44A | 0.261 |
| P44S | 0.247 |
| P44L | 1.111 |
| P44Y | 0.339 |
| P44D | 0.163 |
| P44Q | 0.182 |
| P44H | 0.309 |
| P44K | 0.187 |
| K45A | 0.865 |
| K45S | 1.038 |
| K45L | 1.112 |
| K45Y | 1.104 |
| K45D | 1.194 |
| K45Q | 1.063 |
| K45H | 1.175 |
| K45P | 0.191 |
| L46A | 0.185 |
| L46S | 0.171 |
| L46Y | 0.256 |
| L46D | 0.191 |
| L46Q | 0.234 |
| L46H | 0.166 |
| L46P | 0.179 |
| L46K | 0.243 |
| L47A | 0.257 |
| L47S | 0.222 |
| L47Y | 0.903 |
| L47D | 0.215 |
| L47Q | 0.369 |
| L47H | 0.284 |
| L47P | 0.193 |
| L47K | 0.271 |
| I48A | 1.248 |
| I48S | 0.293 |
| I48Y | 0.408 |
| I48D | 0.239 |
| I48Q | 0.265 |
| I48H | 0.234 |
| I48P | 0.193 |
| I48K | 0.253 |
| Y49A | 0.455 |
| Y49S | 1.154 |
| Y49L | 0.592 |
| Y49D | 1.233 |
| Y49Q | 0.242 |
| Y49H | 1.121 |
| Y49P | 0.188 |
| Y49K | 0.174 |
| G57A | 1.181 |
| G57S | 1.077 |
| G57L | 1.073 |
| G57Y | 1.084 |
| G57D | 0.473 |
| G57Q | 1.113 |
| G57H | 1.186 |
| G57P | 0.496 |
| G57K | 1.191 |
| V58A | 1.021 |
| V58S | 0.399 |
| V58Y | 0.247 |
| V58D | 0.185 |
| V58Q | 0.207 |
| V58H | 0.220 |
| V58P | 0.255 |
| V58K | 0.205 |
| P59A | 0.219 |
| P59S | 1.121 |
| P59L | 0.901 |
| P59Y | 0.893 |
| P59D | 1.123 |
| P59Q | 1.052 |
| P59H | 1.263 |
| P59K | 0.691 |
| S60A | 1.366 |
| S60L | 1.212 |
| S60Y | 1.352 |
| S60D | 1.208 |
| S60Q | 1.125 |
| S60H | 1.486 |
| S60P | 1.337 |
| S60K | 1.459 |
| R61A | 0.210 |
| R61S | 0.768 |
| R61L | 0.211 |
| R61Y | 0.783 |
| R61D | 0.215 |
| R61Q | 0.395 |
| R61H | 1.365 |
| R61P | 0.225 |
| F62A | 0.220 |
| F62S | 0.206 |
| F62L | 0.613 |
| F62Y | 0.960 |
| F62D | 0.208 |
| F62Q | 0.184 |
| F62H | 0.241 |
| F62P | 0.226 |
| F62K | 0.292 |
| S63A | 0.897 |
| S63L | 0.751 |
| S63Y | 0.923 |
| S63D | 0.873 |
| S63Q | 0.964 |
| S63H | 0.774 |
| S63P | 0.205 |
| S63K | 0.997 |
| G64S | 0.907 |
| G64L | 0.189 |
| G64Y | 0.193 |
| G64D | 0.171 |
| G64Q | 0.163 |
| G64H | 0.263 |
| G64P | 0.643 |
| G64K | 0.226 |
| S65A | 0.903 |
| S65L | 0.924 |
| S65Y | 1.010 |
| S65D | 0.593 |
| S65Q | 0.889 |
| S65H | 1.052 |
| S65P | 0.190 |
| S65K | 1.062 |
| G66S | 0.393 |
| G66L | 0.842 |
| G66Y | 0.909 |
| G66D | 0.808 |
| G66Q | 0.972 |
| G66H | 0.883 |
| G66P | 0.184 |
| G66K | 0.968 |
| S67A | 0.944 |
| S67L | 0.863 |
| S67Y | 0.944 |
| S67D | 1.024 |
| S67Q | 0.419 |
| S67H | 0.999 |
| S67P | 0.188 |
| S67K | 0.819 |
| G68S | 1.010 |
| G68L | 0.443 |
| G68Y | 0.305 |
| G68D | 1.002 |
| G68Q | 0.889 |
| G68H | 0.325 |
| G68P | 0.827 |
| G68K | 0.587 |
| T69A | 0.916 |
| T69L | 1.040 |
| T69Y | 1.034 |
| T69D | 1.205 |
| T69Q | 1.018 |
| T69H | 0.904 |
| T69P | 0.760 |
| T69K | 1.037 |
| D70A | 0.916 |
| D70S | 1.016 |
| D70L | 0.991 |
| D70Y | 0.938 |
| D70Q | 1.118 |
| D70H | 1.027 |
| D70P | 0.349 |
| D70K | 0.977 |
| F71A | 0.185 |
| F71S | 0.226 |
| F71L | 0.208 |
| F71Y | 0.597 |
| F71D | 0.176 |
| F71Q | 0.191 |
| F71H | 0.315 |
| F71P | 0.205 |
| F71K | 0.213 |
| T72A | 0.905 |
| T72L | 1.037 |
| T72Y | 0.193 |
| T72D | 0.916 |
| T72Q | 0.966 |
| T72H | 1.026 |
| T72P | 0.149 |
| T72K | 0.936 |
| L73A | 0.225 |
| L73S | 0.152 |
| L73Y | 0.204 |
| L73D | 0.172 |
| L73Q | 0.155 |
| L73H | 0.155 |
| L73P | 0.173 |
| L73K | 0.269 |
| T74A | 0.906 |
| T74L | 0.718 |
| T74Y | 0.640 |
| T74D | 0.962 |
| T74Q | 0.884 |
| T74H | 0.929 |
| T74P | 0.187 |
| T74K | 0.905 |
| I75A | 0.196 |
| I75S | 0.194 |
| I75L | 0.858 |
| I75Y | 0.168 |
| I75D | 0.167 |
| I75Q | 0.203 |
| I75H | 0.201 |
| I75P | 0.183 |
| I75K | 0.180 |
| S76A | 0.970 |
| S76L | 0.832 |
| S76Y | 0.797 |
| S76D | 0.758 |
| S76Q | 0.761 |
| S76H | 0.902 |
| S76P | 0.472 |
| S76K | 0.767 |
| S77A | 0.925 |
| S77L | 0.761 |
| S77Y | 0.852 |
| S77D | 0.485 |
| S77Q | 0.723 |
| S77H | 0.827 |
| S77P | 0.952 |
| S77K | 0.800 |
| L78A | 0.847 |
| L78S | 0.610 |
| L78Y | 0.379 |
| L78D | 0.176 |
| L78Q | 0.273 |
| L78H | 0.210 |
| L78P | 0.369 |
| L78K | 0.489 |
| L79V | 1.435 |
| L79P | 0.246 |
| L79A | 1.382 |
| L79G | 1.404 |
| L79S | 1.392 |
| L79Y | 1.408 |
| L79D | 1.612 |
| L79K | 1.259 |
| L79Q | 1.325 |
| L79H | 1.300 |
| P80A | 0.947 |
| P80S | 0.910 |
| P80L | 0.794 |
| P80Y | 0.766 |
| P80D | 0.741 |
| P80Q | 0.764 |
| P80H | 0.770 |
| P80K | 0.782 |
| E81A | 0.896 |
| E81S | 0.787 |
| E81L | 0.824 |
| E81Y | 0.793 |
| E81D | 0.799 |
| E81Q | 0.808 |
| E81H | 0.795 |
| E81P | 0.761 |
| E81K | 0.803 |
| D82A | 0.219 |
| D82S | 0.224 |
| D82L | 0.244 |
| D82Y | 0.265 |
| D82Q | 0.195 |
| D82H | 0.251 |
| D82P | 0.204 |
| D82K | 0.346 |
| F83A | 1.144 |
| F83G | 1.052 |
| F83S | 0.503 |
| F83L | 1.002 |
| F83Y | 1.291 |
| F83D | 1.141 |
| F83Q | 1.022 |
| F83H | 1.022 |
| F83P | 0.453 |
| A84S | 0.645 |
| A84L | 0.212 |
| A84Y | 0.179 |
| A84D | 0.177 |
| A84Q | 0.280 |
| A84H | 0.326 |
| A84P | 0.178 |
| A84K | 0.292 |
| T85A | 0.920 |
| T85L | 0.742 |
| T85Y | 0.895 |
| T85D | 0.590 |
| T85Q | 0.764 |
| T85H | 0.769 |
| T85P | 0.195 |
| T85K | 0.682 |
| Y86A | 0.153 |
| Y86S | 0.180 |
| Y86L | 0.205 |
| Y86D | 0.194 |
| Y86Q | 0.204 |
| Y86H | 0.212 |
| Y86P | 0.182 |
| Y86K | 0.185 |
| Y87A | 0.219 |
| Y87S | 0.201 |
| Y87L | 0.717 |
| Y87D | 0.208 |
| Y87Q | 0.192 |
| Y87H | 0.222 |
| Y87P | 0.176 |
| Y87K | 0.283 |
| F98A | 0.199 |
| F98S | 0.160 |
| F98L | 0.196 |
| F98Y | 0.666 |
| F98D | 0.179 |
| F98Q | 0.169 |
| F98H | 0.189 |
| F98P | 0.178 |
| F98K | 0.180 |
| G99S | 0.577 |
| G99L | 0.192 |
| G99Y | 0.213 |
| G99D | 0.177 |
| G99Q | 0.181 |
| G99H | 0.190 |
| G99P | 0.181 |
| G99K | 0.207 |
| Q100A | 0.876 |
| Q100S | 0.815 |
| Q100L | 0.628 |
| Q100Y | 0.644 |
| Q100D | 0.318 |
| Q100H | 0.729 |
| Q100P | 0.775 |
| Q100K | 0.376 |
| G101S | 0.195 |
| G101L | 0.191 |
| G101Y | 0.192 |
| G101D | 0.156 |
| G101Q | 0.199 |
| G101H | 0.214 |
| G101P | 0.961 |
| G101K | 0.295 |
| T102A | 0.383 |
| T102L | 0.210 |
| T102Y | 0.183 |
| T102D | 0.154 |
| T102Q | 0.204 |
| T102H | 0.274 |
| T102P | 0.169 |
| T102K | 0.166 |
| K103A | 0.916 |
| K103S | 1.024 |
| K103L | 0.816 |
| K103Y | 0.910 |
| K103D | 0.972 |
| K103Q | 0.258 |
| K103H | 0.975 |
| K103P | 0.319 |
| V104A | 0.667 |
| V104S | 0.208 |
| V104Y | 0.229 |
| V104D | 0.147 |
| V104Q | 0.183 |
| V104H | 0.157 |
| V104P | 0.182 |
| V104K | 0.274 |
| E105A | 0.869 |
| E105S | 0.254 |
| E105L | 0.688 |
| E105Y | 0.382 |
| E105D | 0.204 |
| E105Q | 0.412 |
| E105H | 0.506 |
| E105P | 0.237 |
| E105K | 0.612 |
| I106A | 0.867 |
| I106S | 0.172 |
| I106L | 0.165 |
| I106Y | 0.336 |
| I106D | 0.402 |
| I106Q | 0.164 |
| I106H | 0.306 |
| I106P | 0.203 |
| I106K | 0.501 |
| K106AA | 0.876 |
| K106AS | 0.294 |
| K106AL | 0.152 |
| K106AY | 0.270 |
| K106AD | 0.374 |
| K106AQ | 0.139 |
| K106AH | 0.151 |
| K106AP | 0.598 |
| R107A | 0.972 |
| R107S | 0.530 |
| R107L | 0.389 |
| R107Y | 0.395 |
| R107D | 0.161 |
| R107Q | 0.365 |
| R107H | 0.468 |
| R107P | 0.531 |
| R107K | 0.449 |
| TNFα dAb Fc | 0.819 |

[0124] This first round screen using TNFα binding ELISA identified framework variants where single substitution mutations were tolerated, i.e. variants that were expressed, secreted and retained their ability to bind to target antigen, human TNFα.

### Second Round Testing of Variants for Neutralization of TNFα Induced Cytotoxicity

[0125] A subset of TNFα dAb variants were selected and assessed for their potency in neutralizing TNFα-mediated cytotoxicity in the murine L929 cell line.

[0126] Medium-scale transfections (30 ml) were performed to obtain sufficient protein amounts for the L929 assay. The variants were transiently expressed in suspension variant of CHOK1 cell line using the Freestyle™ MAX CHO transfection method. Six days after transfection, conditioned media was harvested from the transfected cells by centrifugation and the supernatants filtered using 0.22 μm membrane filter. The TNFα dAb variants were purified by Protein A affinity chromatography. After sample loading, unbound proteins were washed off using PBS, variants were eluted using 0.1 M citric acid pH 3.5 and fractions neutralized with the addition of 1 M Tris (pH 9.0). The variants were concentrated and buffer exchanged into PBS using sample concentrators (e.g. Microcon®YM-30 units; Millipore®). Protein concentration was determined by bicinchoninic acid assay (BCA®; Pierce®).

### High Throughput 5-Point L929 Neutralization Assay

[0127] Serial half log dilutions of TNFα dAb variants in RPMI media (containing 10% foetal bovine serum and 2 mM L-glutamine) were prepared in 50 μl volume ranging from 6.25 μg/ml to 0.124 μg/ml across five wells in 96-well flat bottom plates. To each of the test wells, 25 μl of human TNFα (1.5 ng/ml), 25 μl actinomycin D (40 μg/ml) and 50 μl L929 cells (5×105 cells/ml) were added. Controls included a TNFα standard curve ranging from 3125 pg/ml to 0.172 pg/ml across eleven wells, wells containing no TNFα (100% viability) and no cells (background). Assay plates were incubated at 37° C. in a 5% CO2 humidified incubator for 20 hours then a further 2 hours after the addition of 30 μl 3-(4,5-dimethylthiazol-2-yl)-5-(3-carboxymethoxyphenyl)-2-(4-sulfophenyl)-2H-terazolium (MTS)/phenazine ethosulfate (PES). Absorbance was read at 492 nm and viability curves calculated using the average absorbance of duplicate wells. Viability curves were fitted to a sigmoidal dose model using GraphPad software (Prism®).

[0128] FIG. 2 is a representative result generated by the high throughput 5-point L929 assay and Table 2 presents the EC50 values of the tested TNFα dAb Fc framework variants.

TABLE 2
TNFα neutralization potency data of single substitution TNFα
dAb framework variants. Neutralization of TNFα-induced cytotoxicity
results measured as EC50 values in the L929 assay is listed. Lower
values indicate improved potency. This is an exception for those
variants where the resulting curve is a straight line as shown in
FIG. 2 for variant L11P. This data was obtained using the high throughput
5-point format of the L929 neutralization assay.

| TNFα dAb | Standardized |
|---|---|
| variants | EC50 (μg/ml) |
| D1A | 0.556 |
| D1S | 0.846 |
| D1L | 6.038 |
| D1Y | 0.676 |
| D1Q | 1.097 |
| D1H | 1.128 |
| D1K | 0.833 |
| I2A | 1.232 |
| I2S | 2.789 |
| I2L | 0.593 |
| I2Y | 3.606 |
| I2D | 3479.239 |
| I2H | 80.713 |
| I2P | 0.725 |
| I2K | 2.789 |
| Q3A | 2.323 |
| Q3S | 2.580 |
| Q3L | 6.443 |
| Q3Y | 0.450 |
| Q3D | 0.809 |
| Q3H | 0.795 |
| Q3P | 20.462 |
| Q3K | 1.819 |
| Q6A | 123.057 |
| S7A | 0.383 |
| S7L | 1.636 |
| S7Y | 0.928 |
| S7D | 0.676 |
| S7Q | 0.488 |
| S7H | 1.094 |
| S7K | 2.104 |
| S9A | 0.671 |
| S9L | 0.980 |
| S9Y | 1.996 |
| S9D | 0.880 |
| S9Q | 1.167 |
| S9H | 1.226 |
| S9P | 1.299 |
| S9K | 1.229 |
| S10A | 0.661 |
| S10L | 0.616 |
| S10Y | 1.760 |
| S10Q | 1.419 |
| S10H | 1.284 |
| S10P | 6.586 |
| S10K | 2.718 |
| L11A | 0.912 |
| L11S | 1.643 |
| L11Y | 2.774 |
| L11D | 10.150 |
| L11Q | 1.013 |
| L11P | 0.000 |
| L11K | 9.470 |
| S12A | 0.796 |
| S12L | 0.252 |
| S12Y | 1.066 |
| S12D | 1.765 |
| S12Q | 0.822 |
| S12H | 1.443 |
| S12P | 1.352 |
| S12K | 1.046 |
| S14A | 0.681 |
| S14L | 2.665 |
| S14Y | 1.924 |
| S14D | 2.262 |
| S14Q | 0.841 |
| S14H | 4134.019 |
| S14P | 9.960 |
| S14K | 1.760 |
| V15A | 2.403 |
| V15P | 1.243 |
| G16Y | 1.972 |
| D17A | 4.668 |
| D17S | 0.909 |
| D17L | 2.659 |
| D17Q | 0.863 |
| D17H | 10.542 |
| D17P | 667.543 |
| D17K | 8.844 |
| R18A | 3.208 |
| R18S | 0.851 |
| R18L | 1.000 |
| R18Y | 1.588 |
| R18D | 0.741 |
| R18Q | 2.749 |
| R18H | 2.387 |
| R18P | 1.191 |
| R18K | 0.957 |
| V19A | 1.856 |
| T20A | 1.597 |
| T20L | 1.933 |
| T20Y | 6.962 |
| T20D | 3.221 |
| T20Q | 2.020 |
| T20H | 1.686 |
| T20K | 4.381 |
| I21L | 2.395 |
| T22A | 0.725 |
| T22L | 2.509 |
| T22Y | 2.853 |
| T22D | 1.430 |
| T22Q | 2.258 |
| T22H | 11.548 |
| T22K | 2.001 |
| Q37S | 1.978 |
| Q37H | 16.398 |
| Q37K | 6.567 |
| Q38A | 9.108 |
| Q38S | 1.837 |
| Q38Y | 5045.567 |
| Q38H | 1.010 |
| Q38K | 1.890 |
| K39S | 1.601 |
| K39Q | 0.000 |
| P40A | 1.646 |
| P40S | 2.855 |
| P40L | 5.701 |
| P40Y | 26.688 |
| P40D | 1.644 |
| P40Q | 5.350 |
| P40H | 3.291 |
| P40K | 5.286 |
| G41S | 5.343 |
| G41Y | 3.569 |
| G41Q | 2.386 |
| G41H | 2.414 |
| G41P | 7.333 |
| K42A | 0.723 |
| K42S | 0.995 |
| K42L | 1.225 |
| K42Y | 3.346 |
| K42D | 1.496 |
| K42Q | 1.059 |
| K42H | 2.260 |
| A43Y | 666.360 |
| A43Q | 2.686 |
| A43H | 2.742 |
| A43K | 3.130 |
| P44A | 24.381 |
| P44S | 28.760 |
| P44L | 6.193 |
| P44Y | 27.549 |
| P44D | 802.274 |
| P44Q | 0.000 |
| P44K | 0.000 |
| K45A | 2.212 |
| K45S | 0.537 |
| K45L | 1.272 |
| K45Y | 1.377 |
| K45D | 1.404 |
| K45Q | 4.415 |
| K45H | 1.767 |
| Y49A | 6.563 |
| Y49S | 13.159 |
| Y49L | 15.836 |
| Y49D | 1.540 |
| Y49Q | 590.486 |
| Y49H | 0.731 |
| Y49P | 184.975 |
| Y49K | 1573.382 |
| G57A | 2.061 |
| G57S | 0.618 |
| G57L | 2.821 |
| G57Y | 1.005 |
| G57D | 0.948 |
| G57Q | 0.761 |
| G57H | 0.795 |
| G57P | 6.526 |
| G57K | 1.030 |
| P59A | 0.452 |
| P59S | 0.689 |
| P59L | 2.247 |
| P59Y | 1.764 |
| P59D | 0.697 |
| P59Q | 1.172 |
| P59H | 0.971 |
| P59K | 7.043 |
| S60A | 0.176 |
| S60L | 0.640 |
| S60D | 0.417 |
| S60Q | 0.746 |
| S60H | 0.735 |
| S60P | 0.895 |
| S60K | 0.867 |
| R61D | 0.000 |
| R61H | 8.868 |
| F62A | 0.000 |
| F62S | 0.000 |
| F62Y | 0.694 |
| F62D | 0.000 |
| F62H | 12.329 |
| F62P | 0.000 |
| S63Y | 2.025 |
| S63Q | 1.331 |
| S63K | 1.335 |
| G64S | 2.348 |
| S65L | 1.010 |
| S65Y | 4.725 |
| S65H | 3.713 |
| S65K | 3.493 |
| G66Y | 2.438 |
| G66Q | 2166.311 |
| G66K | 541.923 |
| S67D | 5.133 |
| G68S | 2.543 |
| G68D | 6.361 |
| T69A | 19.621 |
| T69L | 3.103 |
| T69Y | 2.490 |
| T69D | 1.345 |
| T69Q | 2.852 |
| T69K | 8.984 |
| D70A | 2.039 |
| D70S | 1.584 |
| D70Q | 3.830 |
| T72H | 5.469 |
| L79A | 1.351 |
| L79S | 0.378 |
| L79Y | 0.392 |
| L79D | 0.766 |
| L79H | 1.343 |
| L79K | 0.503 |
| F83A | 0.682 |
| F83S | 0.839 |
| F83L | 0.636 |
| F83Y | 0.493 |
| F83D | 0.947 |
| F83Q | 1.036 |
| F83H | 1.332 |
| F83P | 16.898 |
| F83G | 6.209 |
| K103S | 1.887 |
| TNFα dAb Fc | 1.200 |

[0129] The mutagenesis approach taken in the present invention identified hotspots, as well as specific substitutions, in the framework regions that resulted in increased potency of the TNFα dAb Fc variants for the TNFα antigen.

### Example 2

### TNFα dAb Variants Containing Multiple Substitutions

[0130] TNFα dAb Fc variants containing multiple substitutions in the VL domain were tested to determine whether the improved potency imparted by the single substitution variants can be combined in an additive manner. To test this, a subset of six single substitutions was selected and a panel of TNFα dAb Fc variants containing double, triple, quadruple substitutions, including a variant containing six substitution mutations were produced. The six selected substitutions are Q3Y, S7Q, S12L, S60A, L79Y and F83Y. The variants comprising multiple substitutions were produced in the same manner as the unmodified TNFα dAb Fc protein, as described in Example 1. That is, a domain antibody construct comprising a variable light (VL) domain antibody (dAb) targeted to human TNFα, a modified hinge region and the heavy chain constant region of human IgG1 but wherein the constant region has a truncated CH1 domain (WO 2007/087673). The sequence of this modified Fc is set out in SEQ ID NO. 6. The constructs described in this Example are herein collectively referred to as ‘Combination TNFα dAb framework variants’.

[0131] The panel of combination TNFα dAb framework variants were produced as described above. Briefly, gene fragments encoding the selected variants were synthesized and inserted into a vector suitable for mammalian cell expression. The variants were transiently expressed in suspension variant of the CHOK1 cell line using the Freestyle™ MAX CHO transfection method. The conditioned media was subjected to Protein A affinity chromatography, and the purified combination variants quantitated using the BCA® assay.

[0132] The combination variants were assayed for their ability to neutralize TNFα-mediated cytotoxicity using the standard 11-point format of the L929 neutralization assay.

### Standard 11-Point L929 Neutralization Assay

[0133] This assay was performed in a similar manner as described in ‘high throughput 5-point L929 neutralization assay’ (see Example 1). In this format serial half log dilutions of combination variants in RPMI media were prepared in 50 μl volume ranging from 52.5 μg/ml to 0.0005 μg/ml across eleven wells in 96-well flat bottom plates.

[0134] Table 3 presents the EC50 values of the combination TNFα dAb framework variants. Several combination variants exhibited further increases in potency, i.e. the ability to neutralize TNFα, when compared to the individual single substitution framework variants.

TABLE 3
TNFα neutralization potency data of combination TNFα
dAb framework variants, as measured by neutralization of TNFα-induced
cytotoxicity of L929 cells. Also listed are additional single substituted
TNFα dAb variants incorporating other amino acids of the same
side-chain functionalities. These are data obtained using the standard
11-point format of the L929 neutralization assay.

| | Standardized EC₅₀ (μg/ml) |
|---|---|
| Variants | Average ± S.D. |
| Q3Y | 1.198 ± 0.345 |
| Q3F | 0.910 ± 0.007 |
| S7Q | 1.496 ± 0.320 |
| S7G | 0.871 ± 0.220 |
| S7N | 0.673 ± 0.139 |
| S12L | 0.922 ± 0.269 |
| S12V | 0.979 ± 0.079 |
| S12T | 0.769 ± 0.187 |
| S60A | 0.896 ± 0.241 |
| S60E | 1.144 ± 0.183 |
| S60G | 0.644 ± 0.171 |
| L79Y | 0.950 ± 0.304 |
| L79F | 1.027 ± 0.063 |
| L79G | 0.549 ± 0.041 |
| F83Y | 0.990 ± 0.300 |
| Q3Y_S7Q | 0.922 ± 0.271 |
| Q3Y_S12L | 0.705 ± 0.011 |
| Q3Y_S60A | 0.968 ± 0.080 |
| Q3Y_L79Y | 1.205 ± 0.108 |
| Q3Y_F83Y | 2.961 ± 0.062 |
| S7Q_S12L | 0.877 ± 0.661 |
| S7Q_S60A | 0.852 ± 0.266 |
| S7Q_L79Y | 1.594 ± 0.856 |
| S7Q_F83Y | 2.240 ± 0.023 |
| S12L_S60A | 2.079 ± 0.448 |
| S12L_F83Y | 1.735 ± 0.374 |
| S60A_F83Y | 0.583 ± 0.196 |
| L79Y_F83Y | 1.292 ± 0.555 |
| Q3Y_S7Q_S12L | 1.092 ± 0.298 |
| Q3Y_S7Q_S60A | 1.431 ± 0.096 |
| Q3Y_S7Q_L79Y | 4.376 ± 3.002 |
| Q3Y_S7Q_F83Y | 2.313 ± 0.607 |
| Q3Y_S12L_S60A | 3.334 ± 1.040 |
| Q3Y_S12L_L79Y | 1.141 ± 0.125 |
| Q3Y_S12L_F83Y | 3.479 ± 0.681 |
| Q3Y_S60A_F83Y | 1.039 ± 0.441 |
| Q3Y_L79Y_F83Y | 2.408 ± 0.510 |
| S7Q_S12L_S60A | 3.539 ± 0.448 |
| S7Q_S12L_L79Y | 2.280 ± 0.078 |
| S7Q_S12L_F83Y | 2.887 ± 2.004 |
| S7Q_S60A_L79Y | 2.131 ± 0.241 |
| S7Q_S60A_F83Y | 2.243 ± 0.455 |
| S7Q_L79Y_F83Y | 1.016 ± 0.245 |
| S12L_S60A_L79Y | 1.481 ± 0.364 |
| S12L_S60A_F83Y | 0.971 ± 0.506 |
| S12L_L79Y_F83Y | 0.959 ± 0.057 |
| S60A_L79Y_F83Y | 1.367 ± 0.421 |
| Q3Y_S12L_S60A_L79Y | 1.993 ± 0.485 |
| Q3Y_S7Q_S60A_L79Y | 1.461 ± 0.475 |
| Q3Y_S7Q_S60A_F83Y | 1.982 ± 0.069 |
| Q3Y_S12L_S60A_F83Y | 1.035 ± 0.312 |
| Q3Y_S7Q_S12L_F83Y | 1.729 ± 0.186 |
| Q3Y_S60A_L79Y_F83Y | 1.966 ± 0.372 |
| Q3Y_S7Q_S12L_S60A | 1.037 ± 0.089 |
| Q3Y_S12L_L79Y_F83Y | 1.298 ± 0.513 |
| Q3Y_S7Q_L79Y_F83Y | 2.133 ± 0.038 |
| S7Q_S12L_L79Y_F83Y | 1.397 ± 0.487 |
| S7Q_S12L_S60A_F83Y | 1.281 ± 0.406 |
| S7Q_S12L_S60A_L79Y | 4.182 ± 1.036 |
| S7Q_S60A_L79Y_F83Y | 5.438 ± 2.931 |
| Q3Y_S7Q_S12L_L79Y | 1.096 ± 0.095 |
| S7Q_S12L_L79Y_F83Y | 2.795 ± 0.188 |
| S12L_S60A_L79Y_F83Y | 0.721 ± 0.235 |
| Q3Y_S7Q_S12L_S60A_L79Y_F83Y | 1.421 ± 0.245 |

### Example 3

### Testing Variants Incorporating Other Amino Acids with Same Side-Chain Functionalities

[0135] In order to ascertain whether the amino acid substitutions are representative of the other amino acids that share the same side-chain functionalities, the following additional TNFα dAb variants were tested for their TNFα neutralization potency:

[0136] (1) Q3F

[0137] (2) S7N, S7G

[0138] (3) S12V, S12T

[0139] (4) S60E, S60G

[0140] (5) L79F, L79G

[0141] These substitutions were selected as they belong to the same amino acid functional class as those identified as improved dAb variants. For example, Q3Y exhibited improved potency, therefore in this Example, Q3F was tested to determine whether the substitution of Q3 into another amino acid containing an aromatic side chain would improve potency. Variants that contain substitutions that belong to the same amino acid class as the amino acid in the original unmodified dAb construct were also tested. These are listed above as the second substitution. For example, as S7Q variant was identified as one with improved potency, S7N was tested here as Q and N are amino acids that have amide in their side-chains and further, S7G was also tested as G is an amino acid with a small side chain, like S in the unmodified construct.

[0142] These variants were produced and tested as described above. Briefly, gene fragments encoding the selected substitutions were synthesized and inserted into a vector suitable for mammalian cell expression. The variants were transiently expressed in suspension variant of the CHOK1 cell line using the Freestyle™ MAX CHO transfection method. The conditioned media was subjected to Protein A affinity chromatography and the purified protein quantitated by BCA® assay. These variants were assayed for their ability to neutralize TNFα-mediated cytotoxicity using the standard format of the L929 neutralization assay described in Example 2.

[0143] The EC50 values of variants tested in this Example are also listed in Table 3, together with data of the combination variants tested also using the standard 11-point format of the L929 assay.

[0144] This Example showed that the use of the nine amino acids as representatives of the different amino acid classes was justified (see Example 1 for the categories that the amino acids represent). All tested variants comprising substitutions into another amino acid of the same amino acid class displayed improved potency as compared to the initially identified variants, except for L79F and S60E that exhibited similar TNFα neutralization potency.

### Example 4

### Variants of Ferritin Targeted Domain Antibodies

[0145] This Example set out to test whether framework variants that resulted in improved function of the TNFα dAb can be applied to domain antibodies of different specificities.

[0146] A different domain antibody was selected—a light chain variable VL dAb targeted to human ferritin. The sequence of the anti-ferritin dAb is SEQ ID NO. 4.

[0147] In the process of designing these dAb variants, the dAb protein sequences were aligned using ClustalW (Higgins et al., 1994). Three dimensional models of VL dAbs were constructed and examined using the MODELER program (Sali and Blundell, 1993; Accelrys® Discovery Studio® v2.0.1.7347). Six framework variants that resulted in improved function of the TNFα dAb selected for this Example were position 3 to Y, position 7 to Q, 12 to L, 60 to A, 79 to Y and 83 to Y.

[0148] Ferritin VL dAb was very similar in sequence and structure, in particular in the framework region, when compared to the TNFα VL dAb. The six selected framework residues were located at similar spatial positions in both the VL dAbs, and therefore, six variants comprising of single substitution mutations at these framework regions of the ferritin dAb were made. Like the TNFα dAb variants, the ferritin VL dAb variants were also produced as Fc fusion constructs. The sequence of the unmodified ferritin VL dAb Fc construct is set out in SEQ ID NO 5. The variants produced were Q3Y, S7Q, S12L, S60A, Q79Y and F83Y and are herein collectively referred to as Territin dAb Fc variants'.

[0149] The gene fragments encoding the variants were optimized for expression in mammalian cells. They were assembled from synthetic oligonucleotides and/or PCR products and cloned into a vector suitable for mammalian cell expression. The final DNA constructs were verified by sequencing.

[0150] The Ferritin dAb Fc framework variants were transiently expressed in suspension variant of the CHOK1 cell line. Transfections were performed using Freestyle™ MAX CHO transfection method. Six days after transfection conditioned media was harvested from by centrifugation and the supernatants filtered using 0.22 μm membrane filter. The variants were purified by Protein A affinity chromatography. After sample loading, unbound proteins were washed off using PBS, variants were eluted using 0.1 M citric acid pH 3.5 and fractions neutralized with the addition of 1 M Tris pH 9.0 then concentrated and buffer exchanged into PBS using sample concentrators (namely Micron YM-30 units or Amicon® Ultra-4 devices; Millipore®). Protein concentration was determined by BCA® assay.

### Testing of Ferritin VL dAb Variants

[0151] The six Ferritin dAb Fc framework variants (Q3Y, S7Q, S12L, S60A, Q79Y and F83Y) as well as unmodified Ferritin dAb Fc construct were assessed for their ability to bind target antigen, human spleen ferritin, in a ferritin binding ELISA.

### Ferritin Binding ELISA

[0152] Ninety-six well flat-bottom plates (MaxiSorp™, Nunc™) were coated with Ferritin dAb Fc proteins (10 μg/ml) in carbonate coating buffer overnight at 4° C. After the overnight incubation, the plates were washed three times in PBS-T then PBS followed by incubation in blocking solution (1% w/v BSA diluted in PBS) for 1 hour at room temperature. After washing, human spleen ferritin (AppliChem) serially diluted 1 in 2 from 126 μg/ml to 0.246 μg/ml in diluent buffer was added to the wells and incubated for 2 hours at room temperature. The plates were washed in PBS-T and PBS then incubated with secondary antibody HRP ferritin polyclonal (Abcam®; 1:2000 in diluent buffer). After one hour incubation at room temperature, plates were washed as above then 100 μl TMB solution added to the wells. Colorimetric development was performed at room temperature and stopped with 50 μl 1 M hydrochloric acid and absorbance read at 450 nm.

[0153] FIG. 3 illustrates the ability of the Ferritin dAb Fc proteins to bind human spleen ferritin, as assayed in the ferritin binding ELISA.

[0154] All Ferritin dAb Fc variants comprising the single framework substitutions were able to bind more ferritin than the unmodified Ferritin dAb Fc protein.

### BIBLIOGRAPHY

[0155] Ashkenazi et al. (1990). Mapping the CD4 binding site for human immunodeficiency virus by alanine-scanning mutagenesis. Proc Natl Acad Sci USA 87: 7150-7154
[0156] Barbas et al. (1992). Semisynthetic combinatorial antibody libraries: a chemical solution to the diversity problem. Proc Natl Acad Sci USA 89: 4457-4461
[0157] Barbas et al. (1992). Human monoclonal Fab fragments derived from a combinatorial library bind to respiratory syncytial virus F glycoprotein and neutralize infectivity. Proc Natl Acad Sci USA 89: 10164-10168.
[0158] Barderas et al. (2008). Affinity maturation of antibodies assisted by in silico modelling. Proc Natl Acad Sci USA 105: 9029-9034
[0159] Berzofsky et al. (1984). Antibody-Antigen Interactions. In Fundamental Immunology. Paul (Ed.) Raven Press: New York
[0160] Breitling et al. (1991). A surface expression vector for antibody screening. Gene 104: 147-153
[0161] Boder et al. (2000). Directed evolution of antibody fragments with monovalent femtomolar antigen-binding affinity. Proc Natl Acad Sci USA 97: 18870-18877
[0162] Burton et al. (1991). A large array of human monoclonal antibodies to type 1 human immunodeficiency virus from combinatorial libraries of asymptomatic seropositive individuals. Proc Natl Acad Sci USA 88:10134-10137
[0163] Cadwell and Joyce (1992). Randomization of genes by PCR mutagenesis. PCR Methods Appl. 2: 28-23
[0164] Caton and Koprowski (1990). Influenza virus hemagglutinin-specific antibodies isolated from a combinatorial expression library are closely related to the immune response of the donor. Proc Natl Acad Sci USA 87:6450-6454
[0165] Chang et al. (1991). Expression of antibody Fab domains on bacteriophage surfaces. Potential use for antibody selection. Journal of Immunology 147: 3610-3614
[0166] Chatellier et al. (1995). Codon-based combinatorial alanine scanning site-directed mutagenesis: design, implementation, and polymerase chain reaction screening. Analytical Biochemistry 229: 282-290
[0167] Chen et al. (1999). Selection and analysis of an optimized anti-VEGF antibody: crystal structure an affinity matured Fab in complex with antigen. Journal of Molecular Biology 293: 865-881
[0168] Clackson et al. (1991). Making antibody fragments using phage display libraries. Nature 352: 624-628
[0169] Chothia et al. (1989). Conformations of immunoglobulin hypervariable regions. Nature 342: 877-883
[0170] Chothia and Lesk (1987). Canonical structures for the hypervariable regions of immunoglobulins. Journal of Molecular Biology 196: 901-917
[0171] Chen et al. (1999). Selection and analysis of an optimized anti-VEGF antibody: crystal structure of an affinity-matured fab in complex with antigen. Journal of Molecular Biology 293: 865-881
[0172] Coia et al. (2001). Protein affinity maturation involving E. coli mutator cells. Journal of Immunological Methods 251: 181-193
[0173] Cunnighman and Wells (1989). High-resolution epitope mapping of hGH-receptor interactions by alanine-scanning mutagenesis. Science 244: 1081-1085
[0174] Daugherty et al. (1998). Antibody affinity maturation using bacterial surface display. Protein Engineering 11: 825-832
[0175] de Kruif et al. (1995). Rapid selection of cell subpopulation-specific human monoclonal antibodies from a synthetic phage antibody library. Proc Natl Acad Sci USA 92: 3938-3942
[0176] Dooley and Flajnik (2005). Shark immunity bites back: affinity maturation and memory response in the nurse shark, Ginglymostoma cirratum. European Journal of Immunology 35:936-945.
[0177] Ellington and Szostak (1990). In vitro selection of RNA molecules that binding specific ligands. Nature 346: 818-822
[0178] Griffiths et al. (1994). Isolation of high affinity human antibodies directly from large synthetic repertoires. EMBO J. 13: 3245-3260
[0179] Finlay et al. (2009). Affinity maturation of a humanized rat antibody for anti-RAGE therapy: comprehensive mutagenesis reveals a high level of mutational plasticity both inside and outside the complementarity-determining regions. Journal of Molecular Biology 388: 541-558
[0180] Fischmann et al. (1991). Crystallographic refinement of the three-dimensional structure of the FabD1.3-lysozyme complex at 2.5-A resolution. Journal of Biological Chemistry 266: 12915-12920
[0181] Foote and Winter (1992). Antibody framework residues affecting the conformation of the hypervariable loops. Journal of Molecular Biology 224: 487-499
[0182] Fromant et al. (1995). Direct random mutagenesis of gene sized DNA fragments using polymerase chain reaction. Analytical Biochemistry 224: 347-353
[0183] Hamers-Casterman et al. (1993). Naturally occurring antibodies devoid of light chains. Nature 363: 446-448
[0184] Harayama (1998). Artificial evolution by DNA shuffling. Trends in Biotechnology 16: 258-261
[0185] Hawkins et al. (1992). Selection of phage antibodies by binding affinity. Mimicking affinity maturation. Journal of Molecular Biology 226: 889-896
[0186] Hawkins and Winter (1992). Cell selection strategies for making antibodies from variable gene libraries: trapping the memory pool. European Journal of Immunology 22: 867-870
[0187] Higgins et al. (1994). CLUSTAL W: improving the sensitivity of progressive multiple sequence alignment through sequence weighting, position-specific gap penalties and weight matrix choice. Nucleic Acids Research 22: 4673-4680
[0188] Ho et al. (2005). In vitro antibody evolution targeting germline hot spots to increase activity of an anti-CD22 immunotoxin. Journal of Biological Chemistry 280: 607-617
[0189] Holliger et al. (1993). “Diabodies”: small bivalent and bispecific antibody fragments. Proc Natl Acad Sci USA 90: 6444-6448
[0190] Holt et al. (2003). Domain antibodies: proteins for therapy. Trends in Biotechnology 21: 484-490
[0191] Honegger and Pluckthun (2001). Yet another numbering scheme for immunoglobulin variable domains: an automatic modelling and analysis tool. Journal of Molecular Biology 309: 657-670
[0192] Hoogenboom and Winter (1992). By-passing immunisation. Human antibodies from synthetic repertoires of germline VH gene segments rearranged in vitro. Journal of Molecular Biology 227: 381-388
[0193] Hoogenboom et al. (1991). Multi-subunit proteins on the surface of filamentous phage: methodologies for displaying antibody (Fab) heavy and light chains. Nucleic Acids Research 19: 4133-4137
[0194] Huse et al. (1989). Generation of a large combinatorial library of the immunoglobulin repertoire in phage lambda. Science 246: 1275-1281
[0195] Irving et al. (1996). Affinity maturation of recombinant antibodies using E. coli mutator cells. Immunotechnology 2: 127-143
[0196] Jackson et al. (1995). In vitro antibody maturation. Journal of Immunology 154: 3310-3319
[0197] Johnson and Wu (2001) Kabat Database and its applications: future directions. Nucleic Acids Res. 29: 205-206.
[0198] Junginger et al. (1994). In Drug Permeation Enhancement. Hsieh (Eds.) Marcel Dekker Inc: New York 59-90
[0199] Kabat et al. (1983). Sequence of Proteins of Immunological Interest. US Department of Health and Human Services.
[0200] Kang et al. (1991a). Linkage of recognition and replication functions by assembling combinatorial antibody Fab libraries along phage surfaces. Proc Natl Acad Sci USA 88: 4363-4366
[0201] Kang et al. (1991b). Antibody redesign by chain shuffling from random combinatorial immunoglobulin libraries. Proc Natl Aca Sci USA. 88: 11120-11123
[0202] Kast and Hilvert (1997). 3D structural information as a guide to protein engineering using genetic selection. Current Opinion in Structural Biology 7: 470-479
[0203] Kettleborough et al. (1991). Humanization of a mouse monoclonal antibody by CDR-grafting: the importance of framework residues on loop conformation. Protein Engineering 4: 773-783
[0204] Knappick et al. (2000). Fully synthetic human combinatorial antibody libraries (HuCAL) based on modular consensus frameworks and CDRs randomized with trinucleotides. Journal of Molecular Biology 296: 57-86
[0205] Koide et al. (2007). Exploring the capacity of minimalist protein interfaces: interface energetics and affinity maturation to picomolar KD of a single-domain antibody with a flat paratope. Journal of Molecular Biology 373: 941-953
[0206] Kuby (1992). Immunology. Freeman and Company: New York
[0207] Jones (1848). On a new substance occurring in the urine of a patient with “mollities ossium.” Phil. Trans Roy Soc London 55-62
[0208] Jones et al. (1986). Replacing the complementarity-determining regions in a human antibody with those from a mouse. Nature 321: 522-525
[0209] Lee et al. (2004). High-affinity human antibodies from phage-displayed synthetic Fab libraries with a single framework scaffold. Journal of Molecular Biology 340: 1073-1093
[0210] LeFranc (2003). IMGT, the international ImMunoGeneTics Database®. Nucleic Acids Research. Nucleic acids Research 31: 307-310
[0211] Low et al. (1996). Mimicking somatic hypermutation: affinity maturation of antibodies displayed on bacteriophage using a bacterial mutator strain. Journal of Molecular Biology 260: 359-368
[0212] Lowman et al. (1991). Selecting high-affinity binding proteins by monovalent phage display. Biochemistry 30: 10832-10838.
[0213] Marks et al. (1991). By-passing immunization. Human antibodies from V-gene libraries displayed on phage. Journal of Molecular Biology 222: 581-597
[0214] Marks et al. (1992). Molecular evolution of proteins on filamentous phage. Mimicking the strategy of the immune system. Journal of Biological Chemistry 267: 16007-160010
[0215] Marks (2004). Antibody affinity maturation by chain shuffling. Methods in Molecular Biology 248: 327-343
[0216] McCafferty et al. (1991). Phage-enzymes: expression and affinity chromatography of functional alkaline phosphatase on the surface of bacteriophage. Protein Engineering 4: 955-961
[0217] McCafferty et al. (1990). Phage antibodies: filamentous phage displaying antibody variable domains. Nature 348: 552-554
[0218] Mullinax et al. (1990). Identification of human antibody fragment clones specific for tetanus toxoid in a bacteriophage lambda immunoexpression library. Proc Natl Acad Sci USA 87: 8095-8099
[0219] Murase et al. (2003). EF-Tu binding peptides identified, dissected, and affinity optimized by phage display. Chemistry and Biology 10: 161-168
[0220] Muyldermans et al. (1994). Sequence and structure of VH domain from naturally occurring camel heavy chain immunoglobulins lacking light chains. Protein Engineering 7:1129-1135
[0221] Nissim et al. (1994). Antibody fragments from a ‘single pot’ phage display library as immunochemical reagents. EMBO J. 13: 692-698
[0222] Pal et al. (2005). Alternative views of functional protein binding epitopes obtained by combinatorial shotgun scanning mutagenesis. Protein Science 14: 2405-2413
[0223] Persson et al. (1991). Generation of diverse high-affinity human monoclonal antibodies by repertoire cloning. Proc Natl Acad Sci USA 88: 2432-2436
[0224] Qin et al. (2007). A novel domain antibody rationally designed against TNFα using variable region of human heavy chain antibody as scaffolds to display antagonistic peptides. Molecular Immunology 44: 2355-2361
[0225] Queen et al. (1989). A Humanized Antibody That Binds To The Interleukin 2 Receptor. Proc Natl Acad Sci USA 86: 10029-10033
[0226] Retter et al. (2005). VBASE2, an integrative V gene database. Nucleic Acids Res. 33: D671-4
[0227] Riechmann et al. (1988). Reshaping Human Antibodies For Therapy. Nature 332: 323-327
[0228] Ridgway et al. (1999). Identification of a Human anti-CD55 single-chain Fv by subtractive panning of a phage library using tumour and non tumour cell lines. Cancer Research 59: 2718-2723
[0229] Robinson (Ed.) (1994). Sustained and controlled release drug delivery systems. Marcel Dekker Inc: NY
[0230] Sali and Blundell (1993). Comparative protein modelling by satisfaction of spatial restraints. Journal of Molecular Biology 234: 779-815
[0231] Schier et al. (1996). Isolation of picomolar affinity anti-c-erbB-2 single-chain Fv by molecular evolution of the complementarity determining regions in the center of the antibody binding site. Journal of Molecular Biology 263: 551-567
[0232] Scott and Smith (1990). Searching for peptide ligands with an epitope library. Science 249: 386-390
[0233] Stemmer (1994). Rapid evolution of a protein in vitro by DNA shuffling. Nature 370: 389-391
[0234] Streltsov et al. (2004). Structural evidence for evolution of shark Ig new antigen receptor variable domain antibodies from a cell-surface receptor. Proc Natl Acad Sci USA 101:12444-12449.
[0235] Tawfik and Griffths (1998). Man-made cell-like compartments for molecular evolution. Nature Biotechnology 16: 652-656
[0236] Thom et al. (2006). Probing a protein-protein interaction by in vitro evolution. Proc Natl Acad Sci USA 103: 7619-7624
[0237] Thompson et al. (1996). Affinity maturation of a high-affinity human monoclonal antibody against the third hypervariable loop of human immunodeficiency virus: use of phage display to improve affinity and broaden strain reactivity. Journal of Molecular Biology 256: 77-88
[0238] Tuerk and Gold (1990). Systematic evolution of ligands by exponential enrichment: RNA ligands to bacteriophage T4 DNA polymerase. Science 249: 505-510
[0239] Tulip et al. (1992). Refined crystal structure of the influenza virus N9 neuraminidase-NC41 Fab complex. Journal of Molecular Biology 227: 122-148
[0240] Vajdos et al. (2002). Comprehensive functional maps of the antigen-binding site of an anti-ErbB2 antibody obtained with shotgun scanning mutagenesis. Journal of Molecular Biology 320: 415-428
[0241] Valjakka et al. (2002). Crystal structure of an in vitro affinity- and specificity-matured anti-testosterone Fab in complex with testosterone. Improved affinity results from small structural changes within the variable domains. Journal of Biological Chemistry 277: 44021-44027
[0242] van den Beucken et al. (2003). Affinity maturation of Fab antibody fragments by fluorescent-activated cell sorting of yeast-displayed libraries. FEBS letters 546: 288-294
[0243] Vaughan et al. (1996). Human antibodies with sub-nanomolar affinities isolated from a large non-immunized phage display library. Nature Biotechnology 14: 309-314
[0244] Verhoeyen et al. (1988). Reshaping human antibodies: grafting an antilysozyme activity. Science 239: 1534-1536
[0245] Ward et al. (1989). Binding activities of a repertoire of single immunoglobulin variable domains secreted from Escherichia coli. Nature 341: 544-546
[0246] Weiss et al. (2000). Rapid mapping of functional protein epitopes by combinatorial alanine-scanning. Proc Natl Acad Sci USA 97: 8950-8954
[0247] Wu et al. (1998). Stepwise in vitro affinity maturation of Vitaxin, an alphav beta3-specific humanized mAb. Proc. Natl. Acad. Sci. U.S.A. 95: 6037-6042
[0248] Xiang et al. (1999). Light-chain framework region residue Try71 of chimeric B72.3 antibody plays an important role in influencing TAG72 antigen binding. Protein Engineering 12: 417-421
[0249] Yang et al. (1995). CDR walking mutagenesis for the affinity maturation of a potent human anti-HIV-1 antibody into the picomolar range. Journal of Molecular Biology 254: 392-403
[0250] Yau et al. (2005). Affinity maturation of a V(H)H by mutational hotspot randomization. Journal of Immunological Methods 297: 213-224
[0251] Yelton et al. (1995). Affinity maturation of the BR96 anti-carcinoma antibody by codon-based mutagenesis. Journal of Immunology 155: 1994-2004
[0252] Yoon et al. (2006). Construction, affinity maturation, and biological characterization of an anti-tumour-associated glycoprotein-72 humanized antibody. Journal of Biological Chemistry 281: 6985-6992
[0253] Zha et al. (2003). Family shuffling with single-stranded DNA. Methods in Molecular Biology 182: 243-257
[0254] Zahnd et al. (2004). Directed in vitro evolution and crystallographic analysis of a peptide-binding single chain antibody fragment (scFv) with low picomolar affinity. Journal of Biological Chemistry 279: 18870-18877
[0255] Zhang et al. (2004). Improved breadth and potency of a HIV-1 neutralizing human single-chain antibody by random mutagenesis and sequence antigen panning. Journal of Molecular Biology 335: 209-219

1-33. (canceled)

34. A modified domain antibody in which the framework sequences of the unmodified domain antibody are as set out in SEQ ID NO 1 and wherein the modified domain antibody includes at least one substitution selected from the group consisting of D1A, D1Y, D1K, I2L, I2P, Q3Y, Q3F, Q3D, Q3H, S7A, S7G, S7D, S7Q, S7N, S9A, S10A, S10L, L11Q, S12A, S12L, S12V, S12T, S12Q, S14A, D17Y, D17H, R18D, R185, T20Y, T22A, T22Y, T22Q, T22H, T22K, Q38H, P40D, K42A, K425, K42H, P44L, K45S, K45L, K45Y, K45D, K45H, 148A, Y49S, Y49D, Y49H, G57A, G57S, G57L, G57Y, G57Q, G57H, G57K, P59A, P59S, P59D, P59H, S60A, S60G, S60L, S60Y, S60D, S60Q, S60H, S60P, S60K, R61H, F62Y, T69D, D70Q, L79A, L79G, L79S, L79Y, L79V, L79D, L79H, L79K, F83A, F83S, F83L, F83Y, F83D and conservative substitutions thereof and combinations thereof.

35. A modified domain antibody as claimed in claim 34 which comprises a substitution selected from the group consisting of L79G, L79S, L79Y, L79K, L79D, L79A, L79V and L79H.

36. A modified domain antibody as claimed in claim 34 which comprises a substitution selected from the group consisting of S60G, S60A, S60D, S60L, S60H, S60Q, S60Y, S60P and S60K.

37. A modified domain antibody as claimed in claim 34 which comprises a substitution selected from the group consisting of S12T, S12L, S12V, S12A and S12Q.

38. A modified domain antibody as claimed in claim 34 which comprises a substitution selected from the group consisting of F83Y, F83L, F83A, F83S and F83D.

39. A modified domain antibody as claimed in claim 34 which comprises a substitution selected from the group consisting of P59A, P59S, P59D and P59H.

40. A modified domain antibody as claimed in claim 34 which comprises a substitution selected from the group consisting of G57S, G57Q, G57H, G57A, G57L, G57Y and G57K.

41. A modified domain antibody as claimed in claim 34 which comprises a substitution selected from the group consisting of Q3F, Q3Y, Q3H and Q3D.

42. A modified domain antibody as claimed in claim 34 which comprises a substitution selected from the group consisting of S7A, S7N, S7G, S7Q and S7D.

43. A domain antibody as claimed in claim 34 in which the domain antibody is attached to an Fc or modified Fc.

44. A domain antibody as claimed in claim 43 in which the sequence of the modified Fc is SEQ ID NO 6 or SEQ ID NO 7.

45. A nucleic acid molecule encoding the domain antibody of claim 34.

46. A nucleic acid molecule as claimed in claim 45 in which the nucleic acid molecule has a sequence selected from SEQ ID NO. 8 to SEQ ID NO. 708.

47. A transformed cell comprising the nucleic acid molecule of claim 45 wherein the cell expresses the nucleic acid molecule.

48. A domain antibody which binds TNFα, the domain antibody having SEQ ID NO 1 wherein at least one amino acid in the framework regions is substituted, wherein the domain antibody has improved TNFα neutralising potency in comparison to the domain antibody of SEQ ID NO 1.

49. A domain antibody as claimed in claim 48 in which the substitution is selected from the group consisting of D1A, D1Y, D1K, I2L, I2P, Q3F, Q3Y, Q3D, Q3H, S7A, S7D, S7Q, S7G, S7N, S9A, S10A, S10L, S12A, S12L, S12Q, S12V, S12T, S14A, R18D, T22A, K42A, K45S, Y49H, G57S, G57Q, G57H, P59A, P59S, P59D, S60G, S60A, S60L, S60D, S60Q, S60H, F62Y, L79G, L79S, L79Y, L79D, L79K, F83A, F83L, F83S, F83Y and conservative substitutions thereof and combinations thereof.

50. A domain antibody as claimed in claim 49 which comprises a substitution selected from the group consisting of L79G, L79S, L79Y, L79K and L79D.

51. A domain antibody as claimed in claim 49 which comprises a substitution selected from the group consisting of S60G, S60A, S60D, S60L, S60H and S60Q.

52. A domain antibody as claimed in claim 49 which comprises a substitution selected from the group consisting of S12T, S12L, S12V, S12A and S12Q.

53. A domain antibody as claimed in claim 49 which comprises a substitution selected from the group consisting of F83Y, F83L, F83A and F83S.

54. A domain antibody as claimed in claim 49 which comprises a substitution selected from the group consisting of P59A, P59S and P59D.

55. A domain antibody as claimed in claim 49 which comprises a substitution selected from the group consisting of G57S, G57Q and G57H.

56. A domain antibody as claimed in claim 49 which comprises a substitution selected from the group consisting of Q3F, Q3Y, Q3H and Q3D.

57. A domain antibody as claimed in claim 49 which comprises a substitution selected from the group consisting of S7A, S7N, S7G, S7Q and S7D.

58. A domain antibody as claimed in claim 48 in which the domain antibody includes multiple substitutions.

59. A domain antibody as claimed in claim 58 in which the multiple substitutions are selected from the group consisting of S60A_F83Y, Q3Y_S12L, S12L_S60A_L79Y_F83Y, S7Q_S60A, S7Q_S12L, Q3Y_S7Q, S12L_L79Y_F83Y, Q3Y_S60A, S12L_S60A_F83Y, S7Q_L79Y_F83Y, Q3Y_S12L_S60A_F83Y, Q3Y_S7Q_S12L_S60A, Q3Y_S60A_F83Y, Q3Y_S7Q_S12L, Q3Y_S7Q_S12L_L79Y, Q3Y_S12L_L79Y, Q3Y_L79Y, S7Q_S12L_S60A_F83Y, L79Y_F83Y, Q3Y_S12L_L79Y_F83Y, S60A_L79Y_F83Y, S7Q_S12L_L79Y_F83Y, Q3Y_S7Q_S12L_S60A_L79Y_F83Y, Q3Y_S7Q_S60A, Q3Y_S7Q_S60A_L79Y and S12L_S60A_L79Y.

60. A domain antibody as claimed in claim 48 in which the domain antibody is attached to an Fc or modified Fc.

61. A domain antibody as claimed in claim 60 in which the sequence of the modified Fc is SEQ ID NO 6 or SEQ ID NO 7.

62. A nucleic acid molecule encoding the domain antibody of claim 48.

63. A nucleic acid molecule as claimed in claim 62 in which the nucleic acid molecule has a sequence selected from SEQ ID NO. 8 to SEQ ID NO. 708.

64. A transformed cell comprising the nucleic acid molecule of claim 62 wherein the cell expresses the nucleic acid molecule.

65. A domain antibody which binds TNFα, the domain antibody having SEQ ID NO 1 wherein at least one amino acid in the framework regions is substituted, wherein the domain antibody has improved TNFα binding and/or improved protein expression levels in comparison to the domain antibody of SEQ ID NO 1.

66. A domain antibody as claimed in claim 65 in which the substitution is selected from the group consisting of S7A, L11Q, D17Y, D17H, R18S, T20Y, T22Y, T22Q, T22H, T22K, Q38H, P40D, K425, K42H, P44L, K45L, K45Y, K45D, K45H, 148A, Y49S, Y49D, Y49H, G57A, G57S, G57L, G57Y, G57Q, G57H, G57K, P59S, P59D, P59H, S60A, S60L, S60Y, S60D, S60Q, S60H, S60P, S60K, R61H, T69D, D70Q, L79A, L79S, L79Y, L79D, L79H, L79K, F83A, F83Y, F83D and conservative substitutions thereof and combinations thereof.

67. A domain antibody as claimed in claim 65 in which the substitution is selected from the group consisting of S7A, Y49H, G57S, G57Q, G57H, P59S, P59D, S60A, S60L, S60D, S60Q, S60H, L79S, L79Y, L79D, L79K, F83A, F83Y and conservative substitutions thereof and combinations thereof.

68. A domain antibody as claimed in claim 65 in which the domain antibody is attached to an Fc or modified Fc.

69. A domain antibody as claimed in claim 68 in which the sequence of the modified Fc is SEQ ID NO 6 or SEQ ID NO 7.

70. A nucleic acid molecule encoding the domain antibody of claim 65.

71. A nucleic acid molecule as claimed in claim 70 in which the nucleic acid molecule has a sequence selected from SEQ ID NO. 8 to SEQ ID NO. 708.

72. A transformed cell comprising the nucleic acid molecule of claim 70 wherein the cell expresses the nucleic acid molecule.

73. A VL domain antibody comprising a VL framework acceptor sequence wherein the framework sequence has been modified such that the framework comprises at least one amino acid substitution at least one position selected from the group consisting of 3, 7, 12, 60, 79, 83 and combinations thereof.

74. A VL domain antibody as claimed in claim 73 wherein the domain antibody comprises at least one framework substitution selected from the group consisting of Y at position 3, Q at position 7, L at position 12, A at position 60, Y at position 79, Y at position 83 and combinations thereof.

75. A domain antibody as claimed in claim 73 in which the domain antibody is attached to an Fc or modified Fc.

76. A domain antibody as claimed in claim 75 in which the sequence of the modified Fc is SEQ ID NO 6 or SEQ ID NO 7.

The application's sequence listing, which the Patent Office published only in electronic form, follows.

SEQUENCE LISTING (709 sequences)

SEQ ID NO: 1 - protein, 108 aa, Artificial Sequence
  Synthetic
DIQMTQSPSSLSASVGDRVTITCRASQAIDSYLHWYQQKPGKAPKLLIYSASNLETGVPSRFSGSGSGTDFTLTISSLLPEDFATYYCQQVVWRPFTFGQGTKVEIKR

SEQ ID NO: 2 - protein, 341 aa, Artificial Sequence
  Synthetic
DIQMTQSPSSLSASVGDRVTITCRASQAIDSYLHWYQQKPGKAPKLLIYSASNLETGVPSRFSGSGSGTDFTLTISSLLPEDFATYYCQQVVWRPFTFGQGTKVEIKRVEPKSSDKTHTCPPCPAPELLGGPSVFLFPPKPKDTLMISRTPEVTCVVVDVSHEDPEVKFNWYVDGVEVHNAKTKPREEQYNSTYRVVSVLTVLHQDWLNGKEYKCKVSNKALPAPIEKTISKAKGQPREPQVYTLPPSRDELTKNQVSLTCLVKGFYPSDIAVEWESNGQPENNYKTTPPVLDSDGSFFLYSKLTVDKSRWQQGNVFSCSVMHEALHNHYTQKSLSLSPGK

SEQ ID NO: 3 - protein, 17 aa, Artificial Sequence
  Synthetic
  MISC_FEATURE (1)..(1): Xaa is valine, leucine or isoleucine
  MISC_FEATURE (6)..(6): Xaa is absent or an amino acid other than cysteine
XEPKSXDKTHTCPPCPA

SEQ ID NO: 4 - protein, 108 aa, Artificial Sequence
  Synthetic
DIQMTQSPASLSASVGETVTITCRASENIYSYLAWYQQKQGKSPQLLVYNAKTLAEGVPSRFSGSGSGTQFSLKINSLQPEDFGSYYCQHHYGTPFTFGSGTKLEIKR

SEQ ID NO: 5 - protein, 341 aa, Artificial Sequence
  Synthetic
DIQMTQSPASLSASVGETVTITCRASENIYSYLAWYQQKQGKSPQLLVYNAKTLAEGVPSRFSGSGSGTQFSLKINSLQPEDFGSYYCQHHYGTPFTFGSGTKLEIKRVEPKSCDKTHTCPPCPAPELLGGPSVFLFPPKPKDTLMISRTPEVTCVVVDVSHEDPEVKFNWYVDGVEVHNAKTKPREEQYNSTYRVVSVLTVLHQDWLNGKEYKCKVSNKALPAPIEKTISKAKGQPREPQVYTLPPSRDELTKNQVSLTCLVKGFYPSDIAVEWESNGQPENNYKTTPPVLDSDGSFFLYSKLTVDKSRWQQGNVFSCSVMHEALHNHYTQKSLSLSPGK

SEQ ID NO: 6 - protein, 233 aa, Artificial Sequence
  Synthetic
VEPKSSDKTHTCPPCPAPELLGGPSVFLFPPKPKDTLMISRTPEVTCVVVDVSHEDPEVKFNWYVDGVEVHNAKTKPREEQYNSTYRVVSVLTVLHQDWLNGKEYKCKVSNKALPAPIEKTISKAKGQPREPQVYTLPPSRDELTKNQVSLTCLVKGFYPSDIAVEWESNGQPENNYKTTPPVLDSDGSFFLYSKLTVDKSRWQQGNVFSCSVMHEALHNHYTQKSLSLSPGK

SEQ ID NO: 7 - protein, 233 aa, Artificial Sequence
  Synthetic
VEPKSCDKTHTCPPCPAPELLGGPSVFLFPPKPKDTLMISRTPEVTCVVVDVSHEDPEVKFNWYVDGVEVHNAKTKPREEQYNSTYRVVSVLTVLHQDWLNGKEYKCKVSNKALPAPIEKTISKAKGQPREPQVYTLPPSRDELTKNQVSLTCLVKGFYPSDIAVEWESNGQPENNYKTTPPVLDSDGSFFLYSKLTVDKSRWQQGNVFSCSVMHEALHNHYTQKSLSLSPGK

SEQ ID NO: 8 - DNA, 1026 bp, Artificial Sequence
  Synthetic
gacatccagatgacccagagccccagcagcctgagcgcctctgtgggcgatagagtgaccatcacctgcagagccagccaggccatcgacagctacctgcactggtatcagcagaagcctggcaaggcccctgccctgctgatctacagcgccagcaatctggagaccggcgtgcctagcagattcagcggcagcggctccggcaccgacttcaccctgaccatcagcagcctgctgcctgaggatttcgccacctactactgccagcaggtggtgtggagacctttcaccttcggccagggcaccaaggtggagatcaagcgggtggagcccaagagcagcgataagacccacacctgccccccctgccctgcccccgagctgctgggcggacccagcgtgttcctgttcccccccaagcctaaggacaccctgatgatcagcagaacccccgaggtgacctgcgtggtggtggatgtgagccacgaggaccctgaggtgaagttcaactggtacgtggacggcgtggaggtgcacaatgccaagaccaagcccagggaggagcagtacaacagcacctaccgggtggtgtccgtgctgaccgtgctgcaccaggattggctgaacggcaaggagtacaagtgcaaggtgtccaacaaggccctgcctgcccctatcgagaaaaccatcagcaaggccaagggccagcccagagagccccaggtgtacaccctgccccctagcagagatgagctgaccaagaaccaggtgtccctgacctgcctggtgaagggcttctaccccagcgacatcgccgtggagtgggagagcaacggccagcccgagaacaactacaagaccaccccccctgtgctggacagcgatggcagcttcttcctgtacagcaagctgaccgtggacaagagcagatggcagcagggcaacgtgttcagctgcagcgtgatgcacgaggccctgcacaatcactacacccagaagagcctgagcctgtcccctggcaagtga

SEQ ID NO: 9 - DNA, 1026 bp, Artificial Sequence
  Synthetic
gacatccagatgacccagagccccagcagcctgagcgcctctgtgggcgatagagtgaccatcacctgcagagccagccaggccatcgacagctacctgcactggtatcagcagaagcctggcaaggcccctagcctgctgatctacagcgccagcaatctggagaccggcgtgcctagcagattcagcggcagcggctccggcaccgacttcaccctgaccatcagcagcctgctgcctgaggatttcgccacctactactgccagcaggtggtgtggagacctttcaccttcggccagggcaccaaggtggagatcaagcgggtggagcccaagagcagcgataagacccacacctgccccccctgccctgcccccgagctgctgggcggacccagcgtgttcctgttcccccccaagcctaaggacaccctgatgatcagcagaacccccgaggtgacctgcgtggtggtggatgtgagccacgaggaccctgaggtgaagttcaactggtacgtggacggcgtggaggtgcacaatgccaagaccaagcccagggaggagcagtacaacagcacctaccgggtggtgtccgtgctgaccgtgctgcaccaggattggctgaacggcaaggagtacaagtgcaaggtgtccaacaaggccctgcctgcccctatcgagaaaaccatcagcaaggccaagggccagcccagagagccccaggtgtacaccctgccccctagcagagatgagctgaccaagaaccaggtgtccctgacctgcctggtgaagggcttctaccccagcgacatcgccgtggagtgggagagcaacggccagcccgagaacaactacaagaccaccccccctgtgctggacagcgatggcagcttcttcctgtacagcaagctgaccgtggacaagagcagatggcagcagggcaacgtgttcagctgcagcgtgatgcacgaggccctgcacaatcactacacccagaagagcctgagcctgtcccctggcaagtga

SEQ ID NO: 10 - DNA, 1026 bp, Artificial Sequence
  Synthetic
gacatccagatgacccagagccccagcagcctgagcgcctctgtgggcgatagagtgaccatcacctgcagagccagccaggccatcgacagctacctgcactggtatcagcagaagcctggcaaggcccctctgctgctgatctacagcgccagcaatctggagaccggcgtgcctagcagattcagcggcagcggctccggcaccgacttcaccctgaccatcagcagcctgctgcctgaggatttcgccacctactactgccagcaggtggtgtggagacctttcaccttcggccagggcaccaaggtggagatcaagcgggtggagcccaagagcagcgataagacccacacctgccccccctgccctgcccccgagctgctgggcggacccagcgtgttcctgttcccccccaagcctaaggacaccctgatgatcagcagaacccccgaggtgacctgcgtggtggtggatgtgagccacgaggaccctgaggtgaagttcaactggtacgtggacggcgtggaggtgcacaatgccaagaccaagcccagggaggagcagtacaacagcacctaccgggtggtgtccgtgctgaccgtgctgcaccaggattggctgaacggcaaggagtacaagtgcaaggtgtccaacaaggccctgcctgcccctatcgagaaaaccatcagcaaggccaagggccagcccagagagccccaggtgtacaccctgccccctagcagagatgagctgaccaagaaccaggtgtccctgacctgcctggtgaagggcttctaccccagcgacatcgccgtggagtgggagagcaacggccagcccgagaacaactacaagaccaccccccctgtgctggacagcgatggcagcttcttcctgtacagcaagctgaccgtggacaagagcagatggcagcagggcaacgtgttcagctgcagcgtgatgcacgaggccctgcacaatcactacacccagaagagcctgagcctgtcccctggcaagtga

SEQ ID NO: 11 - DNA, 1026 bp, Artificial Sequence
  Synthetic
gacatccagatgacccagagccccagcagcctgagcgcctctgtgggcgatagagtgaccatcacctgcagagccagccaggccatcgacagctacctgcactggtatcagcagaagcctggcaaggccccttacctgctgatctacagcgccagcaatctggagaccggcgtgcctagcagattcagcggcagcggctccggcaccgacttcaccctgaccatcagcagcctgctgcctgaggatttcgccacctactactgccagcaggtggtgtggagacctttcaccttcggccagggcaccaaggtggagatcaagcgggtggagcccaagagcagcgataagacccacacctgccccccctgccctgcccccgagctgctgggcggacccagcgtgttcctgttcccccccaagcctaaggacaccctgatgatcagcagaacccccgaggtgacctgcgtggtggtggatgtgagccacgaggaccctgaggtgaagttcaactggtacgtggacggcgtggaggtgcacaatgccaagaccaagcccagggaggagcagtacaacagcacctaccgggtggtgtccgtgctgaccgtgctgcaccaggattggctgaacggcaaggagtacaagtgcaaggtgtccaacaaggccctgcctgcccctatcgagaaaaccatcagcaaggccaagggccagcccagagagccccaggtgtacaccctgccccctagcagagatgagctgaccaagaaccaggtgtccctgacctgcctggtgaagggcttctaccccagcgacatcgccgtggagtgggagagcaacggccagcccgagaacaactacaagaccaccccccctgtgctggacagcgatggcagcttcttcctgtacagcaagctgaccgtggacaagagcagatggcagcagggcaacgtgttcagctgcagcgtgatgcacgaggccctgcacaatcactacacccagaagagcctgagcctgtcccctggcaagtga

SEQ ID NO: 12 - DNA, 1026 bp, Artificial Sequence
  Synthetic
gacatccagatgacccagagccccagcagcctgagcgcctctgtgggcgatagagtgaccatcacctgcagagccagccaggccatcgacagctacctgcactggtatcagcagaagcctggcaaggcccctgacctgctgatctacagcgccagcaatctggagaccggcgtgcctagcagattcagcggcagcggctccggcaccgacttcaccctgaccatcagcagcctgctgcctgaggatttcgccacctactactgccagcaggtggtgtggagacctttcaccttcggccagggcaccaaggtggagatcaagcgggtggagcccaagagcagcgataagacccacacctgccccccctgccctgcccccgagctgctgggcggacccagcgtgttcctgttcccccccaagcctaaggacaccctgatgatcagcagaacccccgaggtgacctgcgtggtggtggatgtgagccacgaggaccctgaggtgaagttcaactggtacgtggacggcgtggaggtgcacaatgccaagaccaagcccagggaggagcagtacaacagcacctaccgggtggtgtccgtgctgaccgtgctgcaccaggattggctgaacggcaaggagtacaagtgcaaggtgtccaacaaggccctgcctgcccctatcgagaaaaccatcagcaaggccaagggccagcccagagagccccaggtgtacaccctgccccctagcagagatgagctgaccaagaaccaggtgtccctgacctgcctggtgaagggcttctaccccagcgacatcgccgtggagtgggagagcaacggccagcccgagaacaactacaagaccaccccccctgtgctggacagcgatggcagcttcttcctgtacagcaagctgaccgtggacaagagcagatggcagcagggcaacgtgttcagctgcagcgtgatgcacgaggccctgcacaatcactacacccagaagagcctgagcctgtcccctggcaagtga

SEQ ID NO: 13 - DNA, 1026 bp, Artificial Sequence
  Synthetic
gacatccagatgacccagagccccagcagcctgagcgcctctgtgggcgatagagtgaccatcacctgcagagccagccaggccatcgacagctacctgcactggtatcagcagaagcctggcaaggcccctcagctgctgatctacagcgccagcaatctggagaccggcgtgcctagcagattcagcggcagcggctccggcaccgacttcaccctgaccatcagcagcctgctgcctgaggatttcgccacctactactgccagcaggtggtgtggagacctttcaccttcggccagggcaccaaggtggagatcaagcgggtggagcccaagagcagcgataagacccacacctgccccccctgccctgcccccgagctgctgggcggacccagcgtgttcctgttcccccccaagcctaaggacaccctgatgatcagcagaacccccgaggtgacctgcgtggtggtggatgtgagccacgaggaccctgaggtgaagttcaactggtacgtggacggcgtggaggtgcacaatgccaagaccaagcccagggaggagcagtacaacagcacctaccgggtggtgtccgtgctgaccgtgctgcaccaggattggctgaacggcaaggagtacaagtgcaaggtgtccaacaaggccctgcctgcccctatcgagaaaaccatcagcaaggccaagggccagcccagagagccccaggtgtacaccctgccccctagcagagatgagctgaccaagaaccaggtgtccctgacctgcctggtgaagggcttctaccccagcgacatcgccgtggagtgggagagcaacggccagcccgagaacaactacaagaccaccccccctgtgctggacagcgatggcagcttcttcctgtacagcaagctgaccgtggacaagagcagatggcagcagggcaacgtgttcagctgcagcgtgatgcacgaggccctgcacaatcactacacccagaagagcctgagcctgtcccctggcaagtga

SEQ ID NO: 14 - DNA, 1026 bp, Artificial Sequence
  Synthetic
gacatccagatgacccagagccccagcagcctgagcgcctctgtgggcgatagagtgaccatcacctgcagagccagccaggccatcgacagctacctgcactggtatcagcagaagcctggcaaggcccctcacctgctgatctacagcgccagcaatctggagaccggcgtgcctagcagattcagcggcagcggctccggcaccgacttcaccctgaccatcagcagcctgctgcctgaggatttcgccacctactactgccagcaggtggtgtggagacctttcaccttcggccagggcaccaaggtggagatcaagcgggtggagcccaagagcagcgataagacccacacctgccccccctgccctgcccccgagctgctgggcggacccagcgtgttcctgttcccccccaagcctaaggacaccctgatgatcagcagaacccccgaggtgacctgcgtggtggtggatgtgagccacgaggaccctgaggtgaagttcaactggtacgtggacggcgtggaggtgcacaatgccaagaccaagcccagggaggagcagtacaacagcacctaccgggtggtgtccgtgctgaccgtgctgcaccaggattggctgaacggcaaggagtacaagtgcaaggtgtccaacaaggccctgcctgcccctatcgagaaaaccatcagcaaggccaagggccagcccagagagccccaggtgtacaccctgccccctagcagagatgagctgaccaagaaccaggtgtccctgacctgcctggtgaagggcttctaccccagcgacatcgccgtggagtgggagagcaacggccagcccgagaacaactacaagaccaccccccctgtgctggacagcgatggcagcttcttcctgtacagcaagctgaccgtggacaagagcagatggcagcagggcaacgtgttcagctgcagcgtgatgcacgaggccctgcacaatcactacacccagaagagcctgagcctgtcccctggcaagtga

SEQ ID NO: 15 - DNA, 1026 bp, Artificial Sequence
  Synthetic
gacatccagatgacccagagccccagcagcctgagcgcctctgtgggcgatagagtgaccatcacctgcagagccagccaggccatcgacagctacctgcactggtatcagcagaagcctggcaaggcccctcccctgctgatctacagcgccagcaatctggagaccggcgtgcctagcagattcagcggcagcggctccggcaccgacttcaccctgaccatcagcagcctgctgcctgaggatttcgccacctactactgccagcaggtggtgtggagacctttcaccttcggccagggcaccaaggtggagatcaagcgggtggagcccaagagcagcgataagacccacacctgccccccctgccctgcccccgagctgctgggcggacccagcgtgttcctgttcccccccaagcctaaggacaccctgatgatcagcagaacccccgaggtgacctgcgtggtggtggatgtgagccacgaggaccctgaggtgaagttcaactggtacgtggacggcgtggaggtgcacaatgccaagaccaagcccagggaggagcagtacaacagcacctaccgggtggtgtccgtgctgaccgtgctgcaccaggattggctgaacggcaaggagtacaagtgcaaggtgtccaacaaggccctgcctgcccctatcgagaaaaccatcagcaaggccaagggccagcccagagagccccaggtgtacaccctgccccctagcagagatgagctgaccaagaaccaggtgtccctgacctgcctggtgaagggcttctaccccagcgacatcgccgtggagtgggagagcaacggccagcccgagaacaactacaagaccaccccccctgtgctggacagcgatggcagcttcttcctgtacagcaagctgaccgtggacaagagcagatggcagcagggcaacgtgttcagctgcagcgtgatgcacgaggccctgcacaatcactacacccagaagagcctgagcctgtcccctggcaagtga

SEQ ID NO: 16 - DNA, 1026 bp, Artificial Sequence
  Synthetic
gacatccagatgacccagagccccagcagcctgagcgcctctgtgggcgatagagtgaccatcacctgcagagccagccaggccatcgacagctacctgcactggtatcagcagaagcctggcaaggcccctaaggccctgatctacagcgccagcaatctggagaccggcgtgcctagcagattcagcggcagcggctccggcaccgacttcaccctgaccatcagcagcctgctgcctgaggatttcgccacctactactgccagcaggtggtgtggagacctttcaccttcggccagggcaccaaggtggagatcaagcgggtggagcccaagagcagcgataagacccacacctgccccccctgccctgcccccgagctgctgggcggacccagcgtgttcctgttcccccccaagcctaaggacaccctgatgatcagcagaacccccgaggtgacctgcgtggtggtggatgtgagccacgaggaccctgaggtgaagttcaactggtacgtggacggcgtggaggtgcacaatgccaagaccaagcccagggaggagcagtacaacagcacctaccgggtggtgtccgtgctgaccgtgctgcaccaggattggctgaacggcaaggagtacaagtgcaaggtgtccaacaaggccctgcctgcccctatcgagaaaaccatcagcaaggccaagggccagcccagagagccccaggtgtacaccctgccccctagcagagatgagctgaccaagaaccaggtgtccctgacctgcctggtgaagggcttctaccccagcgacatcgccgtggagtgggagagcaacggccagcccgagaacaactacaagaccaccccccctgtgctggacagcgatggcagcttcttcctgtacagcaagctgaccgtggacaagagcagatggcagcagggcaacgtgttcagctgcagcgtgatgcacgaggccctgcacaatcactacacccagaagagcctgagcctgtcccctggcaagtga

SEQ ID NO: 17 - DNA, 1026 bp, Artificial Sequence
  Synthetic
gacatccagatgacccagagccccagcagcctgagcgcctctgtgggcgatagagtgaccatcacctgcagagccagccaggccatcgacagctacctgcactggtatcagcagaagcctggcaaggcccctaagagcctgatctacagcgccagcaatctggagaccggcgtgcctagcagattcagcggcagcggctccggcaccgacttcaccctgaccatcagcagcctgctgcctgaggatttcgccacctactactgccagcaggtggtgtggagacctttcaccttcggccagggcaccaaggtggagatcaagcgggtggagcccaagagcagcgataagacccacacctgccccccctgccctgcccccgagctgctgggcggacccagcgtgttcctgttcccccccaagcctaaggacaccctgatgatcagcagaacccccgaggtgacctgcgtggtggtggatgtgagccacgaggaccctgaggtgaagttcaactggtacgtggacggcgtggaggtgcacaatgccaagaccaagcccagggaggagcagtacaacagcacctaccgggtggtgtccgtgctgaccgtgctgcaccaggattggctgaacggcaaggagtacaagtgcaaggtgtccaacaaggccctgcctgcccctatcgagaaaaccatcagcaaggccaagggccagcccagagagccccaggtgtacaccctgccccctagcagagatgagctgaccaagaaccaggtgtccctgacctgcctggtgaagggcttctaccccagcgacatcgccgtggagtgggagagcaacggccagcccgagaacaactacaagaccaccccccctgtgctggacagcgatggcagcttcttcctgtacagcaagctgaccgtggacaagagcagatggcagcagggcaacgtgttcagctgcagcgtgatgcacgaggccctgcacaatcactacacccagaagagcctgagcctgtcccctggcaagtga

SEQ ID NO: 18 - DNA, 1026 bp, Artificial Sequence
  Synthetic
gacatccagatgacccagagccccagcagcctgagcgcctctgtgggcgatagagtgaccatcacctgcagagccagccaggccatcgacagctacctgcactggtatcagcagaagcctggcaaggcccctaagtacctgatctacagcgccagcaatctggagaccggcgtgcctagcagattcagcggcagcggctccggcaccgacttcaccctgaccatcagcagcctgctgcctgaggatttcgccacctactactgccagcaggtggtgtggagacctttcaccttcggccagggcaccaaggtggagatcaagcgggtggagcccaagagcagcgataagacccacacctgccccccctgccctgcccccgagctgctgggcggacccagcgtgttcctgttcccccccaagcctaaggacaccctgatgatcagcagaacccccgaggtgacctgcgtggtggtggatgtgagccacgaggaccctgaggtgaagttcaactggtacgtggacggcgtggaggtgcacaatgccaagaccaagcccagggaggagcagtacaacagcacctaccgggtggtgtccgtgctgaccgtgctgcaccaggattggctgaacggcaaggagtacaagtgcaaggtgtccaacaaggccctgcctgcccctatcgagaaaaccatcagcaaggccaagggccagcccagagagccccaggtgtacaccctgccccctagcagagatgagctgaccaagaaccaggtgtccctgacctgcctggtgaagggcttctaccccagcgacatcgccgtggagtgggagagcaacggccagcccgagaacaactacaagaccaccccccctgtgctggacagcgatggcagcttcttcctgtacagcaagctgaccgtggacaagagcagatggcagcagggcaacgtgttcagctgcagcgtgatgcacgaggccctgcacaatcactacacccagaagagcctgagcctgtcccctggcaagtga

SEQ ID NO: 19 - DNA, 1026 bp, Artificial Sequence
  Synthetic
gacatccagatgacccagagccccagcagcctgagcgcctctgtgggcgatagagtgaccatcacctgcagagccagccaggccatcgacagctacctgcactggtatcagcagaagcctggcaaggcccctaaggacctgatctacagcgccagcaatctggagaccggcgtgcctagcagattcagcggcagcggctccggcaccgacttcaccctgaccatcagcagcctgctgcctgaggatttcgccacctactactgccagcaggtggtgtggagacctttcaccttcggccagggcaccaaggtggagatcaagcgggtggagcccaagagcagcgataagacccacacctgccccccctgccctgcccccgagctgctgggcggacccagcgtgttcctgttcccccccaagcctaaggacaccctgatgatcagcagaacccccgaggtgacctgcgtggtggtggatgtgagccacgaggaccctgaggtgaagttcaactggtacgtggacggcgtggaggtgcacaatgccaagaccaagcccagggaggagcagtacaacagcacctaccgggtggtgtccgtgctgaccgtgctgcaccaggattggctgaacggcaaggagtacaagtgcaaggtgtccaacaaggccctgcctgcccctatcgagaaaaccatcagcaaggccaagggccagcccagagagccccaggtgtacaccctgccccctagcagagatgagctgaccaagaaccaggtgtccctgacctgcctggtgaagggcttctaccccagcgacatcgccgtggagtgggagagcaacggccagcccgagaacaactacaagaccaccccccctgtgctggacagcgatggcagcttcttcctgtacagcaagctgaccgtggacaagagcagatggcagcagggcaacgtgttcagctgcagcgtgatgcacgaggccctgcacaatcactacacccagaagagcctgagcctgtcccctggcaagtga

SEQ ID NO: 20 - DNA, 1026 bp, Artificial Sequence
  Synthetic
gacatccagatgacccagagccccagcagcctgagcgcctctgtgggcgatagagtgaccatcacctgcagagccagccaggccatcgacagctacctgcactggtatcagcagaagcctggcaaggcccctaagaagctgatctacagcgccagcaatctggagaccggcgtgcctagcagattcagcggcagcggctccggcaccgacttcaccctgaccatcagcagcctgctgcctgaggatttcgccacctactactgccagcaggtggtgtggagacctttcaccttcggccagggcaccaaggtggagatcaagcgggtggagcccaagagcagcgataagacccacacctgccccccctgccctgcccccgagctgctgggcggacccagcgtgttcctgttcccccccaagcctaaggacaccctgatgatcagcagaacccccgaggtgacctgcgtggtggtggatgtgagccacgaggaccctgaggtgaagttcaactggtacgtggacggcgtggaggtgcacaatgccaagaccaagcccagggaggagcagtacaacagcacctaccgggtggtgtccgtgctgaccgtgctgcaccaggattggctgaacggcaaggagtacaagtgcaaggtgtccaacaaggccctgcctgcccctatcgagaaaaccatcagcaaggccaagggccagcccagagagccccaggtgtacaccctgccccctagcagagatgagctgaccaagaaccaggtgtccctgacctgcctggtgaagggcttctaccccagcgacatcgccgtggagtgggagagcaacggccagcccgagaacaactacaagaccaccccccctgtgctggacagcgatggcagcttcttcctgtacagcaagctgaccgtggacaagagcagatggcagcagggcaacgtgttcagctgcagcgtgatgcacgaggccctgcacaatcactacacccagaagagcctgagcctgtcccctggcaagtga

SEQ ID NO: 21 - DNA, 1026 bp, Artificial Sequence
  Synthetic
gacatccagatgacccagagccccagcagcctgagcgcctctgtgggcgatagagtgaccatcacctgcagagccagccaggccatcgacagctacctgcactggtatcagcagaagcctggcaaggcccctaagcagctgatctacagcgccagcaatctggagaccggcgtgcctagcagattcagcggcagcggctccggcaccgacttcaccctgaccatcagcagcctgctgcctgaggatttcgccacctactactgccagcaggtggtgtggagacctttcaccttcggccagggcaccaaggtggagatcaagcgggtggagcccaagagcagcgataagacccacacctgccccccctgccctgcccccgagctgctgggcggacccagcgtgttcctgttcccccccaagcctaaggacaccctgatgatcagcagaacccccgaggtgacctgcgtggtggtggatgtgagccacgaggaccctgaggtgaagttcaactggtacgtggacggcgtggaggtgcacaatgccaagaccaagcccagggaggagcagtacaacagcacctaccgggtggtgtccgtgctgaccgtgctgcaccaggattggctgaacggcaaggagtacaagtgcaaggtgtccaacaaggccctgcctgcccctatcgagaaaaccatcagcaaggccaagggccagcccagagagccccaggtgtacaccctgccccctagcagagatgagctgaccaagaaccaggtgtccctgacctgcctggtgaagggcttctaccccagcgacatcgccgtggagtgggagagcaacggccagcccgagaacaactacaagaccaccccccctgtgctggacagcgatggcagcttcttcctgtacagcaagctgaccgtggacaagagcagatggcagcagggcaacgtgttcagctgcagcgtgatgcacgaggccctgcacaatcactacacccagaagagcctgagcctgtcccctggcaagtga

SEQ ID NO: 22 - DNA, 1026 bp, Artificial Sequence
  Synthetic
gacatccagatgacccagagccccagcagcctgagcgcctctgtgggcgatagagtgaccatcacctgcagagccagccaggccatcgacagctacctgcactggtatcagcagaagcctggcaaggcccctaagcacctgatctacagcgccagcaatctggagaccggcgtgcctagcagattcagcggcagcggctccggcaccgacttcaccctgaccatcagcagcctgctgcctgaggatttcgccacctactactgccagcaggtggtgtggagacctttcaccttcggccagggcaccaaggtggagatcaagcgggtggagcccaagagcagcgataagacccacacctgccccccctgccctgcccccgagctgctgggcggacccagcgtgttcctgttcccccccaagcctaaggacaccctgatgatcagcagaacccccgaggtgacctgcgtggtggtggatgtgagccacgaggaccctgaggtgaagttcaactggtacgtggacggcgtggaggtgcacaatgccaagaccaagcccagggaggagcagtacaacagcacctaccgggtggtgtccgtgctgaccgtgctgcaccaggattggctgaacggcaaggagtacaagtgcaaggtgtccaacaaggccctgcctgcccctatcgagaaaaccatcagcaaggccaagggccagcccagagagccccaggtgtacaccctgccccctagcagagatgagctgaccaagaaccaggtgtccctgacctgcctggtgaagggcttctaccccagcgacatcgccgtggagtgggagagcaacggccagcccgagaacaactacaagaccaccccccctgtgctggacagcgatggcagcttcttcctgtacagcaagctgaccgtggacaagagcagatggcagcagggcaacgtgttcagctgcagcgtgatgcacgaggccctgcacaatcactacacccagaagagcctgagcctgtcccctggcaagtga

SEQ ID NO: 23 - DNA, 1026 bp, Artificial Sequence
  Synthetic
gacatccagatgacccagagccccagcagcctgagcgcctctgtgggcgatagagtgaccatcacctgcagagccagccaggccatcgacagctacctgcactggtatcagcagaagcctggcaaggcccctaagcccctgatctacagcgccagcaatctggagaccggcgtgcctagcagattcagcggcagcggctccggcaccgacttcaccctgaccatcagcagcctgctgcctgaggatttcgccacctactactgccagcaggtggtgtggagacctttcaccttcggccagggcaccaaggtggagatcaagcgggtggagcccaagagcagcgataagacccacacctgccccccctgccctgcccccgagctgctgggcggacccagcgtgttcctgttcccccccaagcctaaggacaccctgatgatcagcagaacccccgaggtgacctgcgtggtggtggatgtgagccacgaggaccctgaggtgaagttcaactggtacgtggacggcgtggaggtgcacaatgccaagaccaagcccagggaggagcagtacaacagcacctaccgggtggtgtccgtgctgaccgtgctgcaccaggattggctgaacggcaaggagtacaagtgcaaggtgtccaacaaggccctgcctgcccctatcgagaaaaccatcagcaaggccaagggccagcccagagagccccaggtgtacaccctgccccctagcagagatgagctgaccaagaaccaggtgtccctgacctgcctggtgaagggcttctaccccagcgacatcgccgtggagtgggagagcaacggccagcccgagaacaactacaagaccaccccccctgtgctggacagcgatggcagcttcttcctgtacagcaagctgaccgtggacaagagcagatggcagcagggcaacgtgttcagctgcagcgtgatgcacgaggccctgcacaatcactacacccagaagagcctgagcctgtcccctggcaagtga

SEQ ID NO: 24 - DNA, 1026 bp, Artificial Sequence
  Synthetic
gacatccagatgacccagagccccagcagcctgagcgcctctgtgggcgatagagtgaccatcacctgcagagccagccaggccatcgacagctacctgcactggtatcagcagaagcctggcaaggcccctaagctgtacatctacagcgccagcaatctggagaccggcgtgcctagcagattcagcggcagcggctccggcaccgacttcaccctgaccatcagcagcctgctgcctgaggatttcgccacctactactgccagcaggtggtgtggagacctttcaccttcggccagggcaccaaggtggagatcaagcgggtggagcccaagagcagcgataagacccacacctgccccccctgccctgcccccgagctgctgggcggacccagcgtgttcctgttcccccccaagcctaaggacaccctgatgatcagcagaacccccgaggtgacctgcgtggtggtggatgtgagccacgaggaccctgaggtgaagttcaactggtacgtggacggcgtggaggtgcacaatgccaagaccaagcccagggaggagcagtacaacagcacctaccgggtggtgtccgtgctgaccgtgctgcaccaggattggctgaacggcaaggagtacaagtgcaaggtgtccaacaaggccctgcctgcccctatcgagaaaaccatcagcaaggccaagggccagcccagagagccccaggtgtacaccctgccccctagcagagatgagctgaccaagaaccaggtgtccctgacctgcctggtgaagggcttctaccccagcgacatcgccgtggagtgggagagcaacggccagcccgagaacaactacaagaccaccccccctgtgctggacagcgatggcagcttcttcctgtacagcaagctgaccgtggacaagagcagatggcagcagggcaacgtgttcagctgcagcgtgatgcacgaggccctgcacaatcactacacccagaagagcctgagcctgtcccctggcaagtga

SEQ ID NO: 25 - DNA, 1026 bp, Artificial Sequence
  Synthetic
gacatccagatgacccagagccccagcagcctgagcgcctctgtgggcgatagagtgaccatcacctgcagagccagccaggccatcgacagctacctgcactggtatcagcagaagcctggcaaggcccctaagctggacatctacagcgccagcaatctggagaccggcgtgcctagcagattcagcggcagcggctccggcaccgacttcaccctgaccatcagcagcctgctgcctgaggatttcgccacctactactgccagcaggtggtgtggagacctttcaccttcggccagggcaccaaggtggagatcaagcgggtggagcccaagagcagcgataagacccacacctgccccccctgccctgcccccgagctgctgggcggacccagcgtgttcctgttcccccccaagcctaaggacaccctgatgatcagcagaacccccgaggtgacctgcgtggtggtggatgtgagccacgaggaccctgaggtgaagttcaactggtacgtggacggcgtggaggtgcacaatgccaagaccaagcccagggaggagcagtacaacagcacctaccgggtggtgtccgtgctgaccgtgctgcaccaggattggctgaacggcaaggagtacaagtgcaaggtgtccaacaaggccctgcctgcccctatcgagaaaaccatcagcaaggccaagggccagcccagagagccccaggtgtacaccctgccccctagcagagatgagctgaccaagaaccaggtgtccctgacctgcctggtgaagggcttctaccccagcgacatcgccgtggagtgggagagcaacggccagcccgagaacaactacaagaccaccccccctgtgctggacagcgatggcagcttcttcctgtacagcaagctgaccgtggacaagagcagatggcagcagggcaacgtgttcagctgcagcgtgatgcacgaggccctgcacaatcactacacccagaagagcctgagcctgtcccctggcaagtga

SEQ ID NO: 26 - DNA, 1026 bp, Artificial Sequence
  Synthetic
gacatccagatgacccagagccccagcagcctgagcgcctctgtgggcgatagagtgaccatcacctgcagagccagccaggccatcgacagctacctgcactggtatcagcagaagcctggcaaggcccctaagctggccatctacagcgccagcaatctggagaccggcgtgcctagcagattcagcggcagcggctccggcaccgacttcaccctgaccatcagcagcctgctgcctgaggatttcgccacctactactgccagcaggtggtgtggagacctttcaccttcggccagggcaccaaggtggagatcaagcgggtggagcccaagagcagcgataagacccacacctgccccccctgccctgcccccgagctgctgggcggacccagcgtgttcctgttcccccccaagcctaaggacaccctgatgatcagcagaacccccgaggtgacctgcgtggtggtggatgtgagccacgaggaccctgaggtgaagttcaactggtacgtggacggcgtggaggtgcacaatgccaagaccaagcccagggaggagcagtacaacagcacctaccgggtggtgtccgtgctgaccgtgctgcaccaggattggctgaacggcaaggagtacaagtgcaaggtgtccaacaaggccctgcctgcccctatcgagaaaaccatcagcaaggccaagggccagcccagagagccccaggtgtacaccctgccccctagcagagatgagctgaccaagaaccaggtgtccctgacctgcctggtgaagggcttctaccccagcgacatcgccgtggagtgggagagcaacggccagcccgagaacaactacaagaccaccccccctgtgctggacagcgatggcagcttcttcctgtacagcaagctgaccgtggacaagagcagatggcagcagggcaacgtgttcagctgcagcgtgatgcacgaggccctgcacaatcactacacccagaagagcctgagcctgtcccctggcaagtga

SEQ ID NO: 27 - DNA, 1026 bp, Artificial Sequence
  Synthetic
gacatccagatgacccagagccccagcagcctgagcgcctctgtgggcgatagagtgaccatcacctgcagagccagccaggccatcgacagctacctgcactggtatcagcagaagcctggcaaggcccctaagctgagcatctacagcgccagcaatctggagaccggcgtgcctagcagattcagcggcagcggctccggcaccgacttcaccctgaccatcagcagcctgctgcctgaggatttcgccacctactactgccagcaggtggtgtggagacctttcaccttcggccagggcaccaaggtggagatcaagcgggtggagcccaagagcagcgataagacccacacctgccccccctgccctgcccccgagctgctgggcggacccagcgtgttcctgttcccccccaagcctaaggacaccctgatgatcagcagaacccccgaggtgacctgcgtggtggtggatgtgagccacgaggaccctgaggtgaagttcaactggtacgtggacggcgtggaggtgcacaatgccaagaccaagcccagggaggagcagtacaacagcacctaccgggtggtgtccgtgctgaccgtgctgcaccaggattggctgaacggcaaggagtacaagtgcaaggtgtccaacaaggccctgcctgcccctatcgagaaaaccatcagcaaggccaagggccagcccagagagccccaggtgtacaccctgccccctagcagagatgagctgaccaagaaccaggtgtccctgacctgcctggtgaagggcttctaccccagcgacatcgccgtggagtgggagagcaacggccagcccgagaacaactacaagaccaccccccctgtgctggacagcgatggcagcttcttcctgtacagcaagctgaccgtggacaagagcagatggcagcagggcaacgtgttcagctgcagcgtgatgcacgaggccctgcacaatcactacacccagaagagcctgagcctgtcccctggcaagtga

SEQ ID NO: 28 - DNA, 1026 bp, Artificial Sequence
  Synthetic
gacatccagatgacccagagccccagcagcctgagcgcctctgtgggcgatagagtgaccatcacctgcagagccagccaggccatcgacagctacctgcactggtatcagcagaagcctggcaaggcccctaagctgctggcctacagcgccagcaatctggagaccggcgtgcctagcagattcagcggcagcggctccggcaccgacttcaccctgaccatcagcagcctgctgcctgaggatttcgccacctactactgccagcaggtggtgtggagacctttcaccttcggccagggcaccaaggtggagatcaagcgggtggagcccaagagcagcgataagacccacacctgccccccctgccctgcccccgagctgctgggcggacccagcgtgttcctgttcccccccaagcctaaggacaccctgatgatcagcagaacccccgaggtgacctgcgtggtggtggatgtgagccacgaggaccctgaggtgaagttcaactggtacgtggacggcgtggaggtgcacaatgccaagaccaagcccagggaggagcagtacaacagcacctaccgggtggtgtccgtgctgaccgtgctgcaccaggattggctgaacggcaaggagtacaagtgcaaggtgtccaacaaggccctgcctgcccctatcgagaaaaccatcagcaaggccaagggccagcccagagagccccaggtgtacaccctgccccctagcagagatgagctgaccaagaaccaggtgtccctgacctgcctggtgaagggcttctaccccagcgacatcgccgtggagtgggagagcaacggccagcccgagaacaactacaagaccaccccccctgtgctggacagcgatggcagcttcttcctgtacagcaagctgaccgtggacaagagcagatggcagcagggcaacgtgttcagctgcagcgtgatgcacgaggccctgcacaatcactacacccagaagagcctgagcctgtcccctggcaagtga

SEQ ID NO: 29 - DNA, 1026 bp, Artificial Sequence
  Synthetic
gacatccagatgacccagagccccagcagcctgagcgcctctgtgggcgatagagtgaccatcacctgcagagccagccaggccatcgacagctacctgcactggtatcagcagaagcctggcaaggcccctaagctgaagatctacagcgccagcaatctggagaccggcgtgcctagcagattcagcggcagcggctccggcaccgacttcaccctgaccatcagcagcctgctgcctgaggatttcgccacctactactgccagcaggtggtgtggagacctttcaccttcggccagggcaccaaggtggagatcaagcgggtggagcccaagagcagcgataagacccacacctgccccccctgccctgcccccgagctgctgggcggacccagcgtgttcctgttcccccccaagcctaaggacaccctgatgatcagcagaacccccgaggtgacctgcgtggtggtggatgtgagccacgaggaccctgaggtgaagttcaactggtacgtggacggcgtggaggtgcacaatgccaagaccaagcccagggaggagcagtacaacagcacctaccgggtggtgtccgtgctgaccgtgctgcaccaggattggctgaacggcaaggagtacaagtgcaaggtgtccaacaaggccctgcctgcccctatcgagaaaaccatcagcaaggccaagggccagcccagagagccccaggtgtacaccctgccccctagcagagatgagctgaccaagaaccaggtgtccctgacctgcctggtgaagggcttctaccccagcgacatcgccgtggagtgggagagcaacggccagcccgagaacaactacaagaccaccccccctgtgctggacagcgatggcagcttcttcctgtacagcaagctgaccgtggacaagagcagatggcagcagggcaacgtgttcagctgcagcgtgatgcacgaggccctgcacaatcactacacccagaagagcctgagcctgtcccctggcaagtga

SEQ ID NO: 30 - DNA, 1026 bp, Artificial Sequence
  Synthetic
gacatccagatgacccagagccccagcagcctgagcgcctctgtgggcgatagagtgaccatcacctgcagagccagccaggccatcgacagctacctgcactggtatcagcagaagcctggcaaggcccctaagctgcagatctacagcgccagcaatctggagaccggcgtgcctagcagattcagcggcagcggctccggcaccgacttcaccctgaccatcagcagcctgctgcctgaggatttcgccacctactactgccagcaggtggtgtggagacctttcaccttcggccagggcaccaaggtggagatcaagcgggtggagcccaagagcagcgataagacccacacctgccccccctgccctgcccccgagctgctgggcggacccagcgtgttcctgttcccccccaagcctaaggacaccctgatgatcagcagaacccccgaggtgacctgcgtggtggtggatgtgagccacgaggaccctgaggtgaagttcaactggtacgtggacggcgtggaggtgcacaatgccaagaccaagcccagggaggagcagtacaacagcacctaccgggtggtgtccgtgctgaccgtgctgcaccaggattggctgaacggcaaggagtacaagtgcaaggtgtccaacaaggccctgcctgcccctatcgagaaaaccatcagcaaggccaagggccagcccagagagccccaggtgtacaccctgccccctagcagagatgagctgaccaagaaccaggtgtccctgacctgcctggtgaagggcttctaccccagcgacatcgccgtggagtgggagagcaacggccagcccgagaacaactacaagaccaccccccctgtgctggacagcgatggcagcttcttcctgtacagcaagctgaccgtggacaagagcagatggcagcagggcaacgtgttcagctgcagcgtgatgcacgaggccctgcacaatcactacacccagaagagcctgagcctgtcccctggcaagtga

SEQ ID NO: 31 - DNA, 1026 bp, Artificial Sequence
  Synthetic
gacatccagatgacccagagccccagcagcctgagcgcctctgtgggcgatagagtgaccatcacctgcagagccagccaggccatcgacagctacctgcactggtatcagcagaagcctggcaaggcccctaagctgcacatctacagcgccagcaatctggagaccggcgtgcctagcagattcagcggcagcggctccggcaccgacttcaccctgaccatcagcagcctgctgcctgaggatttcgccacctactactgccagcaggtggtgtggagacctttcaccttcggccagggcaccaaggtggagatcaagcgggtggagcccaagagcagcgataagacccacacctgccccccctgccctgcccccgagctgctgggcggacccagcgtgttcctgttcccccccaagcctaaggacaccctgatgatcagcagaacccccgaggtgacctgcgtggtggtggatgtgagccacgaggaccctgaggtgaagttcaactggtacgtggacggcgtggaggtgcacaatgccaagaccaagcccagggaggagcagtacaacagcacctaccgggtggtgtccgtgctgaccgtgctgcaccaggattggctgaacggcaaggagtacaagtgcaaggtgtccaacaaggccctgcctgcccctatcgagaaaaccatcagcaaggccaagggccagcccagagagccccaggtgtacaccctgccccctagcagagatgagctgaccaagaaccaggtgtccctgacctgcctggtgaagggcttctaccccagcgacatcgccgtggagtgggagagcaacggccagcccgagaacaactacaagaccaccccccctgtgctggacagcgatggcagcttcttcctgtacagcaagctgaccgtggacaagagcagatggcagcagggcaacgtgttcagctgcagcgtgatgcacgaggccctgcacaatcactacacccagaagagcctgagcctgtcccctggcaagtga

SEQ ID NO: 32 - DNA, 1026 bp, Artificial Sequence
  Synthetic
gacatccagatgacccagagccccagcagcctgagcgcctctgtgggcgatagagtgaccatcacctgcagagccagccaggccatcgacagctacctgcactggtatcagcagaagcctggcaaggcccctaagctgcccatctacagcgccagcaatctggagaccggcgtgcctagcagattcagcggcagcggctccggcaccgacttcaccctgaccatcagcagcctgctgcctgaggatttcgccacctactactgccagcaggtggtgtggagacctttcaccttcggccagggcaccaaggtggagatcaagcgggtggagcccaagagcagcgataagacccacacctgccccccctgccctgcccccgagctgctgggcggacccagcgtgttcctgttcccccccaagcctaaggacaccctgatgatcagcagaacccccgaggtgacctgcgtggtggtggatgtgagccacgaggaccctgaggtgaagttcaactggtacgtggacggcgtggaggtgcacaatgccaagaccaagcccagggaggagcagtacaacagcacctaccgggtggtgtccgtgctgaccgtgctgcaccaggattggctgaacggcaaggagtacaagtgcaaggtgtccaacaaggccctgcctgcccctatcgagaaaaccatcagcaaggccaagggccagcccagagagccccaggtgtacaccctgccccctagcagagatgagctgaccaagaaccaggtgtccctgacctgcctggtgaagggcttctaccccagcgacatcgccgtggagtgggagagcaacggccagcccgagaacaactacaagaccaccccccctgtgctggacagcgatggcagcttcttcctgtacagcaagctgaccgtggacaagagcagatggcagcagggcaacgtgttcagctgcagcgtgatgcacgaggccctgcacaatcactacacccagaagagcctgagcctgtcccctggcaagtga

SEQ ID NO: 33 - DNA, 1026 bp, Artificial Sequence
  Synthetic
gacatccagatgacccagagccccagcagcctgagcgcctctgtgggcgatagagtgaccatcacctgcagagccagccaggccatcgacagctacctgcactggtatcagcagaagcctggcaaggcccctaagctgctgagctacagcgccagcaatctggagaccggcgtgcctagcagattcagcggcagcggctccggcaccgacttcaccctgaccatcagcagcctgctgcctgaggatttcgccacctactactgccagcaggtggtgtggagacctttcaccttcggccagggcaccaaggtggagatcaagcgggtggagcccaagagcagcgataagacccacacctgccccccctgccctgcccccgagctgctgggcggacccagcgtgttcctgttcccccccaagcctaaggacaccctgatgatcagcagaacccccgaggtgacctgcgtggtggtggatgtgagccacgaggaccctgaggtgaagttcaactggtacgtggacggcgtggaggtgcacaatgccaagaccaagcccagggaggagcagtacaacagcacctaccgggtggtgtccgtgctgaccgtgctgcaccaggattggctgaacggcaaggagtacaagtgcaaggtgtccaacaaggccctgcctgcccctatcgagaaaaccatcagcaaggccaagggccagcccagagagccccaggtgtacaccctgccccctagcagagatgagctgaccaagaaccaggtgtccctgacctgcctggtgaagggcttctaccccagcgacatcgccgtggagtgggagagcaacggccagcccgagaacaactacaagaccaccccccctgtgctggacagcgatggcagcttcttcctgtacagcaagctgaccgtggacaagagcagatggcagcagggcaacgtgttcagctgcagcgtgatgcacgaggccctgcacaatcactacacccagaagagcctgagcctgtcccctggcaagtga

SEQ ID NO: 34 - DNA, 1026 bp, Artificial Sequence
  Synthetic
gacatccagatgacccagagccccagcagcctgagcgcctctgtgggcgatagagtgaccatcacctgcagagccagccaggccatcgacagctacctgcactggtatcagcagaagcctggcaaggcccctaagctgctgtactacagcgccagcaatctggagaccggcgtgcctagcagattcagcggcagcggctccggcaccgacttcaccctgaccatcagcagcctgctgcctgaggatttcgccacctactactgccagcaggtggtgtggagacctttcaccttcggccagggcaccaaggtggagatcaagcgggtggagcccaagagcagcgataagacccacacctgccccccctgccctgcccccgagctgctgggcggacccagcgtgttcctgttcccccccaagcctaaggacaccctgatgatcagcagaacccccgaggtgacctgcgtggtggtggatgtgagccacgaggaccctgaggtgaagttcaactggtacgtggacggcgtggaggtgcacaatgccaagaccaagcccagggaggagcagtacaacagcacctaccgggtggtgtccgtgctgaccgtgctgcaccaggattggctgaacggcaaggagtacaagtgcaaggtgtccaacaaggccctgcctgcccctatcgagaaaaccatcagcaaggccaagggccagcccagagagccccaggtgtacaccctgccccctagcagagatgagctgaccaagaaccaggtgtccctgacctgcctggtgaagggcttctaccccagcgacatcgccgtggagtgggagagcaacggccagcccgagaacaactacaagaccaccccccctgtgctggacagcgatggcagcttcttcctgtacagcaagctgaccgtggacaagagcagatggcagcagggcaacgtgttcagctgcagcgtgatgcacgaggccctgcacaatcactacacccagaagagcctgagcctgtcccctggcaagtga

SEQ ID NO: 35 - DNA, 1026 bp, Artificial Sequence
  Synthetic
gacatccagatgacccagagccccagcagcctgagcgcctctgtgggcgatagagtgaccatcacctgcagagccagccaggccatcgacagctacctgcactggtatcagcagaagcctggcaaggcccctaagctgctggactacagcgccagcaatctggagaccggcgtgcctagcagattcagcggcagcggctccggcaccgacttcaccctgaccatcagcagcctgctgcctgaggatttcgccacctactactgccagcaggtggtgtggagacctttcaccttcggccagggcaccaaggtggagatcaagcgggtggagcccaagagcagcgataagacccacacctgccccccctgccctgcccccgagctgctgggcggacccagcgtgttcctgttcccccccaagcctaaggacaccctgatgatcagcagaacccccgaggtgacctgcgtggtggtggatgtgagccacgaggaccctgaggtgaagttcaactggtacgtggacggcgtggaggtgcacaatgccaagaccaagcccagggaggagcagtacaacagcacctaccgggtggtgtccgtgctgaccgtgctgcaccaggattggctgaacggcaaggagtacaagtgcaaggtgtccaacaaggccctgcctgcccctatcgagaaaaccatcagcaaggccaagggccagcccagagagccccaggtgtacaccctgccccctagcagagatgagctgaccaagaaccaggtgtccctgacctgcctggtgaagggcttctaccccagcgacatcgccgtggagtgggagagcaacggccagcccgagaacaactacaagaccaccccccctgtgctggacagcgatggcagcttcttcctgtacagcaagctgaccgtggacaagagcagatggcagcagggcaacgtgttcagctgcagcgtgatgcacgaggccctgcacaatcactacacccagaagagcctgagcctgtcccctggcaagtga

SEQ ID NO: 36 - DNA, 1026 bp, Artificial Sequence
  Synthetic
gacatccagatgacccagagccccagcagcctgagcgcctctgtgggcgatagagtgaccatcacctgcagagccagccaggccatcgacagctacctgcactggtatcagcagaagcctggcaaggcccctaagctgctgaagtacagcgccagcaatctggagaccggcgtgcctagcagattcagcggcagcggctccggcaccgacttcaccctgaccatcagcagcctgctgcctgaggatttcgccacctactactgccagcaggtggtgtggagacctttcaccttcggccagggcaccaaggtggagatcaagcgggtggagcccaagagcagcgataagacccacacctgccccccctgccctgcccccgagctgctgggcggacccagcgtgttcctgttcccccccaagcctaaggacaccctgatgatcagcagaacccccgaggtgacctgcgtggtggtggatgtgagccacgaggaccctgaggtgaagttcaactggtacgtggacggcgtggaggtgcacaatgccaagaccaagcccagggaggagcagtacaacagcacctaccgggtggtgtccgtgctgaccgtgctgcaccaggattggctgaacggcaaggagtacaagtgcaaggtgtccaacaaggccctgcctgcccctatcgagaaaaccatcagcaaggccaagggccagcccagagagccccaggtgtacaccctgccccctagcagagatgagctgaccaagaaccaggtgtccctgacctgcctggtgaagggcttctaccccagcgacatcgccgtggagtgggagagcaacggccagcccgagaacaactacaagaccaccccccctgtgctggacagcgatggcagcttcttcctgtacagcaagctgaccgtggacaagagcagatggcagcagggcaacgtgttcagctgcagcgtgatgcacgaggccctgcacaatcactacacccagaagagcctgagcctgtcccctggcaagtga

SEQ ID NO: 37 - DNA, 1026 bp, Artificial Sequence
  Synthetic
gacatccagatgacccagagccccagcagcctgagcgcctctgtgggcgatagagtgaccatcacctgcagagccagccaggccatcgacagctacctgcactggtatcagcagaagcctggcaaggcccctaagctgctgcagtacagcgccagcaatctggagaccggcgtgcctagcagattcagcggcagcggctccggcaccgacttcaccctgaccatcagcagcctgctgcctgaggatttcgccacctactactgccagcaggtggtgtggagacctttcaccttcggccagggcaccaaggtggagatcaagcgggtggagcccaagagcagcgataagacccacacctgccccccctgccctgcccccgagctgctgggcggacccagcgtgttcctgttcccccccaagcctaaggacaccctgatgatcagcagaacccccgaggtgacctgcgtggtggtggatgtgagccacgaggaccctgaggtgaagttcaactggtacgtggacggcgtggaggtgcacaatgccaagaccaagcccagggaggagcagtacaacagcacctaccgggtggtgtccgtgctgaccgtgctgcaccaggattggctgaacggcaaggagtacaagtgcaaggtgtccaacaaggccctgcctgcccctatcgagaaaaccatcagcaaggccaagggccagcccagagagccccaggtgtacaccctgccccctagcagagatgagctgaccaagaaccaggtgtccctgacctgcctggtgaagggcttctaccccagcgacatcgccgtggagtgggagagcaacggccagcccgagaacaactacaagaccaccccccctgtgctggacagcgatggcagcttcttcctgtacagcaagctgaccgtggacaagagcagatggcagcagggcaacgtgttcagctgcagcgtgatgcacgaggccctgcacaatcactacacccagaagagcctgagcctgtcccctggcaagtga

SEQ ID NO: 38 - DNA, 1026 bp, Artificial Sequence
  Synthetic
gacatccagatgacccagagccccagcagcctgagcgcctctgtgggcgatagagtgaccatcacctgcagagccagccaggccatcgacagctacctgcactggtatcagcagaagcctggcaaggcccctaagctgctgcactacagcgccagcaatctggagaccggcgtgcctagcagattcagcggcagcggctccggcaccgacttcaccctgaccatcagcagcctgctgcctgaggatttcgccacctactactgccagcaggtggtgtggagacctttcaccttcggccagggcaccaaggtggagatcaagcgggtggagcccaagagcagcgataagacccacacctgccccccctgccctgcccccgagctgctgggcggacccagcgtgttcctgttcccccccaagcctaaggacaccctgatgatcagcagaacccccgaggtgacctgcgtggtggtggatgtgagccacgaggaccctgaggtgaagttcaactggtacgtggacggcgtggaggtgcacaatgccaagaccaagcccagggaggagcagtacaacagcacctaccgggtggtgtccgtgctgaccgtgctgcaccaggattggctgaacggcaaggagtacaagtgcaaggtgtccaacaaggccctgcctgcccctatcgagaaaaccatcagcaaggccaagggccagcccagagagccccaggtgtacaccctgccccctagcagagatgagctgaccaagaaccaggtgtccctgacctgcctggtgaagggcttctaccccagcgacatcgccgtggagtgggagagcaacggccagcccgagaacaactacaagaccaccccccctgtgctggacagcgatggcagcttcttcctgtacagcaagctgaccgtggacaagagcagatggcagcagggcaacgtgttcagctgcagcgtgatgcacgaggccctgcacaatcactacacccagaagagcctgagcctgtcccctggcaagtga

SEQ ID NO: 39 - DNA, 1026 bp, Artificial Sequence
  Synthetic
gacatccagatgacccagagccccagcagcctgagcgcctctgtgggcgatagagtgaccatcacctgcagagccagccaggccatcgacagctacctgcactggtatcagcagaagcctggcaaggcccctaagctgctgccctacagcgccagcaatctggagaccggcgtgcctagcagattcagcggcagcggctccggcaccgacttcaccctgaccatcagcagcctgctgcctgaggatttcgccacctactactgccagcaggtggtgtggagacctttcaccttcggccagggcaccaaggtggagatcaagcgggtggagcccaagagcagcgataagacccacacctgccccccctgccctgcccccgagctgctgggcggacccagcgtgttcctgttcccccccaagcctaaggacaccctgatgatcagcagaacccccgaggtgacctgcgtggtggtggatgtgagccacgaggaccctgaggtgaagttcaactggtacgtggacggcgtggaggtgcacaatgccaagaccaagcccagggaggagcagtacaacagcacctaccgggtggtgtccgtgctgaccgtgctgcaccaggattggctgaacggcaaggagtacaagtgcaaggtgtccaacaaggccctgcctgcccctatcgagaaaaccatcagcaaggccaagggccagcccagagagccccaggtgtacaccctgccccctagcagagatgagctgaccaagaaccaggtgtccctgacctgcctggtgaagggcttctaccccagcgacatcgccgtggagtgggagagcaacggccagcccgagaacaactacaagaccaccccccctgtgctggacagcgatggcagcttcttcctgtacagcaagctgaccgtggacaagagcagatggcagcagggcaacgtgttcagctgcagcgtgatgcacgaggccctgcacaatcactacacccagaagagcctgagcctgtcccctggcaagtga

SEQ ID NO: 40 - DNA, 1026 bp, Artificial Sequence
  Synthetic
gacatccagatgacccagagccccagcagcctgagcgcctctgtgggcgatagagtgaccatcacctgcagagccagccaggccatcgacagctacctgcactggtatcagcagaagcctggcaaggcccctaagctgctgatcgccagcgccagcaatctggagaccggcgtgcctagcagattcagcggcagcggctccggcaccgacttcaccctgaccatcagcagcctgctgcctgaggatttcgccacctactactgccagcaggtggtgtggagacctttcaccttcggccagggcaccaaggtggagatcaagcgggtggagcccaagagcagcgataagacccacacctgccccccctgccctgcccccgagctgctgggcggacccagcgtgttcctgttcccccccaagcctaaggacaccctgatgatcagcagaacccccgaggtgacctgcgtggtggtggatgtgagccacgaggaccctgaggtgaagttcaactggtacgtggacggcgtggaggtgcacaatgccaagaccaagcccagggaggagcagtacaacagcacctaccgggtggtgtccgtgctgaccgtgctgcaccaggattggctgaacggcaaggagtacaagtgcaaggtgtccaacaaggccctgcctgcccctatcgagaaaaccatcagcaaggccaagggccagcccagagagccccaggtgtacaccctgccccctagcagagatgagctgaccaagaaccaggtgtccctgacctgcctggtgaagggcttctaccccagcgacatcgccgtggagtgggagagcaacggccagcccgagaacaactacaagaccaccccccctgtgctggacagcgatggcagcttcttcctgtacagcaagctgaccgtggacaagagcagatggcagcagggcaacgtgttcagctgcagcgtgatgcacgaggccctgcacaatcactacacccagaagagcctgagcctgtcccctggcaagtga

SEQ ID NO: 41 - DNA, 1026 bp, Artificial Sequence
  Synthetic
gacatccagatgacccagagccccagcagcctgagcgcctctgtgggcgatagagtgaccatcacctgcagagccagccaggccatcgacagctacctgcactggtatcagcagaagcctggcaaggcccctaagctgctgatcagcagcgccagcaatctggagaccggcgtgcctagcagattcagcggcagcggctccggcaccgacttcaccctgaccatcagcagcctgctgcctgaggatttcgccacctactactgccagcaggtggtgtggagacctttcaccttcggccagggcaccaaggtggagatcaagcgggtggagcccaagagcagcgataagacccacacctgccccccctgccctgcccccgagctgctgggcggacccagcgtgttcctgttcccccccaagcctaaggacaccctgatgatcagcagaacccccgaggtgacctgcgtggtggtggatgtgagccacgaggaccctgaggtgaagttcaactggtacgtggacggcgtggaggtgcacaatgccaagaccaagcccagggaggagcagtacaacagcacctaccgggtggtgtccgtgctgaccgtgctgcaccaggattggctgaacggcaaggagtacaagtgcaaggtgtccaacaaggccctgcctgcccctatcgagaaaaccatcagcaaggccaagggccagcccagagagccccaggtgtacaccctgccccctagcagagatgagctgaccaagaaccaggtgtccctgacctgcctggtgaagggcttctaccccagcgacatcgccgtggagtgggagagcaacggccagcccgagaacaactacaagaccaccccccctgtgctggacagcgatggcagcttcttcctgtacagcaagctgaccgtggacaagagcagatggcagcagggcaacgtgttcagctgcagcgtgatgcacgaggccctgcacaatcactacacccagaagagcctgagcctgtcccctggcaagtga

SEQ ID NO: 42 - DNA, 1026 bp, Artificial Sequence
  Synthetic
gacatccagatgacccagagccccagcagcctgagcgcctctgtgggcgatagagtgaccatcacctgcagagccagccaggccatcgacagctacctgcactggtatcagcagaagcctggcaaggcccctaagctgctgatcctgagcgccagcaatctggagaccggcgtgcctagcagattcagcggcagcggctccggcaccgacttcaccctgaccatcagcagcctgctgcctgaggatttcgccacctactactgccagcaggtggtgtggagacctttcaccttcggccagggcaccaaggtggagatcaagcgggtggagcccaagagcagcgataagacccacacctgccccccctgccctgcccccgagctgctgggcggacccagcgtgttcctgttcccccccaagcctaaggacaccctgatgatcagcagaacccccgaggtgacctgcgtggtggtggatgtgagccacgaggaccctgaggtgaagttcaactggtacgtggacggcgtggaggtgcacaatgccaagaccaagcccagggaggagcagtacaacagcacctaccgggtggtgtccgtgctgaccgtgctgcaccaggattggctgaacggcaaggagtacaagtgcaaggtgtccaacaaggccctgcctgcccctatcgagaaaaccatcagcaaggccaagggccagcccagagagccccaggtgtacaccctgccccctagcagagatgagctgaccaagaaccaggtgtccctgacctgcctggtgaagggcttctaccccagcgacatcgccgtggagtgggagagcaacggccagcccgagaacaactacaagaccaccccccctgtgctggacagcgatggcagcttcttcctgtacagcaagctgaccgtggacaagagcagatggcagcagggcaacgtgttcagctgcagcgtgatgcacgaggccctgcacaatcactacacccagaagagcctgagcctgtcccctggcaagtga

SEQ ID NO: 43 - DNA, 1026 bp, Artificial Sequence
  Synthetic
gacatccagatgacccagagccccagcagcctgagcgcctctgtgggcgatagagtgaccatcacctgcagagccagccaggccatcgacagctacctgcactggtatcagcagaagcctggcaaggcccctaagctgctgatctacagcgccagcaatctggagaccgacgtgcctagcagattcagcggcagcggctccggcaccgacttcaccctgaccatcagcagcctgctgcctgaggatttcgccacctactactgccagcaggtggtgtggagacctttcaccttcggccagggcaccaaggtggagatcaagcgggtggagcccaagagcagcgataagacccacacctgccccccctgccctgcccccgagctgctgggcggacccagcgtgttcctgttcccccccaagcctaaggacaccctgatgatcagcagaacccccgaggtgacctgcgtggtggtggatgtgagccacgaggaccctgaggtgaagttcaactggtacgtggacggcgtggaggtgcacaatgccaagaccaagcccagggaggagcagtacaacagcacctaccgggtggtgtccgtgctgaccgtgctgcaccaggattggctgaacggcaaggagtacaagtgcaaggtgtccaacaaggccctgcctgcccctatcgagaaaaccatcagcaaggccaagggccagcccagagagccccaggtgtacaccctgccccctagcagagatgagctgaccaagaaccaggtgtccctgacctgcctggtgaagggcttctaccccagcgacatcgccgtggagtgggagagcaacggccagcccgagaacaactacaagaccaccccccctgtgctggacagcgatggcagcttcttcctgtacagcaagctgaccgtggacaagagcagatggcagcagggcaacgtgttcagctgcagcgtgatgcacgaggccctgcacaatcactacacccagaagagcctgagcctgtcccctggcaagtga

SEQ ID NO: 44 - DNA, 1026 bp, Artificial Sequence
  Synthetic
gacatccagatgacccagagccccagcagcctgagcgcctctgtgggcgatagagtgaccatcacctgcagagccagccaggccatcgacagctacctgcactggtatcagcagaagcctggcaaggcccctaagctgctgatcgacagcgccagcaatctggagaccggcgtgcctagcagattcagcggcagcggctccggcaccgacttcaccctgaccatcagcagcctgctgcctgaggatttcgccacctactactgccagcaggtggtgtggagacctttcaccttcggccagggcaccaaggtggagatcaagcgggtggagcccaagagcagcgataagacccacacctgccccccctgccctgcccccgagctgctgggcggacccagcgtgttcctgttcccccccaagcctaaggacaccctgatgatcagcagaacccccgaggtgacctgcgtggtggtggatgtgagccacgaggaccctgaggtgaagttcaactggtacgtggacggcgtggaggtgcacaatgccaagaccaagcccagggaggagcagtacaacagcacctaccgggtggtgtccgtgctgaccgtgctgcaccaggattggctgaacggcaaggagtacaagtgcaaggtgtccaacaaggccctgcctgcccctatcgagaaaaccatcagcaaggccaagggccagcccagagagccccaggtgtacaccctgccccctagcagagatgagctgaccaagaaccaggtgtccctgacctgcctggtgaagggcttctaccccagcgacatcgccgtggagtgggagagcaacggccagcccgagaacaactacaagaccaccccccctgtgctggacagcgatggcagcttcttcctgtacagcaagctgaccgtggacaagagcagatggcagcagggcaacgtgttcagctgcagcgtgatgcacgaggccctgcacaatcactacacccagaagagcctgagcctgtcccctggcaagtga

SEQ ID NO: 45 - DNA, 1026 bp, Artificial Sequence
  Synthetic
gacatccagatgacccagagccccagcagcctgagcgcctctgtgggcgatagagtgaccatcacctgcagagccagccaggccatcgacagctacctgcactggtatcagcagaagcctggcaaggcccctaagctgctgatcaagagcgccagcaatctggagaccggcgtgcctagcagattcagcggcagcggctccggcaccgacttcaccctgaccatcagcagcctgctgcctgaggatttcgccacctactactgccagcaggtggtgtggagacctttcaccttcggccagggcaccaaggtggagatcaagcgggtggagcccaagagcagcgataagacccacacctgccccccctgccctgcccccgagctgctgggcggacccagcgtgttcctgttcccccccaagcctaaggacaccctgatgatcagcagaacccccgaggtgacctgcgtggtggtggatgtgagccacgaggaccctgaggtgaagttcaactggtacgtggacggcgtggaggtgcacaatgccaagaccaagcccagggaggagcagtacaacagcacctaccgggtggtgtccgtgctgaccgtgctgcaccaggattggctgaacggcaaggagtacaagtgcaaggtgtccaacaaggccctgcctgcccctatcgagaaaaccatcagcaaggccaagggccagcccagagagccccaggtgtacaccctgccccctagcagagatgagctgaccaagaaccaggtgtccctgacctgcctggtgaagggcttctaccccagcgacatcgccgtggagtgggagagcaacggccagcccgagaacaactacaagaccaccccccctgtgctggacagcgatggcagcttcttcctgtacagcaagctgaccgtggacaagagcagatggcagcagggcaacgtgttcagctgcagcgtgatgcacgaggccctgcacaatcactacacccagaagagcctgagcctgtcccctggcaagtga

SEQ ID NO: 46 - DNA, 1026 bp, Artificial Sequence
  Synthetic
gacatccagatgacccagagccccagcagcctgagcgcctctgtgggcgatagagtgaccatcacctgcagagccagccaggccatcgacagctacctgcactggtatcagcagaagcctggcaaggcccctaagctgctgatccagagcgccagcaatctggagaccggcgtgcctagcagattcagcggcagcggctccggcaccgacttcaccctgaccatcagcagcctgctgcctgaggatttcgccacctactactgccagcaggtggtgtggagacctttcaccttcggccagggcaccaaggtggagatcaagcgggtggagcccaagagcagcgataagacccacacctgccccccctgccctgcccccgagctgctgggcggacccagcgtgttcctgttcccccccaagcctaaggacaccctgatgatcagcagaacccccgaggtgacctgcgtggtggtggatgtgagccacgaggaccctgaggtgaagttcaactggtacgtggacggcgtggaggtgcacaatgccaagaccaagcccagggaggagcagtacaacagcacctaccgggtggtgtccgtgctgaccgtgctgcaccaggattggctgaacggcaaggagtacaagtgcaaggtgtccaacaaggccctgcctgcccctatcgagaaaaccatcagcaaggccaagggccagcccagagagccccaggtgtacaccctgccccctagcagagatgagctgaccaagaaccaggtgtccctgacctgcctggtgaagggcttctaccccagcgacatcgccgtggagtgggagagcaacggccagcccgagaacaactacaagaccaccccccctgtgctggacagcgatggcagcttcttcctgtacagcaagctgaccgtggacaagagcagatggcagcagggcaacgtgttcagctgcagcgtgatgcacgaggccctgcacaatcactacacccagaagagcctgagcctgtcccctggcaagtga

SEQ ID NO: 47 - DNA, 1026 bp, Artificial Sequence
  Synthetic
gacatccagatgacccagagccccagcagcctgagcgcctctgtgggcgatagagtgaccatcacctgcagagccagccaggccatcgacagctacctgcactggtatcagcagaagcctggcaaggcccctaagctgctgatccacagcgccagcaatctggagaccggcgtgcctagcagattcagcggcagcggctccggcaccgacttcaccctgaccatcagcagcctgctgcctgaggatttcgccacctactactgccagcaggtggtgtggagacctttcaccttcggccagggcaccaaggtggagatcaagcgggtggagcccaagagcagcgataagacccacacctgccccccctgccctgcccccgagctgctgggcggacccagcgtgttcctgttcccccccaagcctaaggacaccctgatgatcagcagaacccccgaggtgacctgcgtggtggtggatgtgagccacgaggaccctgaggtgaagttcaactggtacgtggacggcgtggaggtgcacaatgccaagaccaagcccagggaggagcagtacaacagcacctaccgggtggtgtccgtgctgaccgtgctgcaccaggattggctgaacggcaaggagtacaagtgcaaggtgtccaacaaggccctgcctgcccctatcgagaaaaccatcagcaaggccaagggccagcccagagagccccaggtgtacaccctgccccctagcagagatgagctgaccaagaaccaggtgtccctgacctgcctggtgaagggcttctaccccagcgacatcgccgtggagtgggagagcaacggccagcccgagaacaactacaagaccaccccccctgtgctggacagcgatggcagcttcttcctgtacagcaagctgaccgtggacaagagcagatggcagcagggcaacgtgttcagctgcagcgtgatgcacgaggccctgcacaatcactacacccagaagagcctgagcctgtcccctggcaagtga

SEQ ID NO: 48 - DNA, 1026 bp, Artificial Sequence
  Synthetic
gacatccagatgacccagagccccagcagcctgagcgcctctgtgggcgatagagtgaccatcacctgcagagccagccaggccatcgacagctacctgcactggtatcagcagaagcctggcaaggcccctaagctgctgatccccagcgccagcaatctggagaccggcgtgcctagcagattcagcggcagcggctccggcaccgacttcaccctgaccatcagcagcctgctgcctgaggatttcgccacctactactgccagcaggtggtgtggagacctttcaccttcggccagggcaccaaggtggagatcaagcgggtggagcccaagagcagcgataagacccacacctgccccccctgccctgcccccgagctgctgggcggacccagcgtgttcctgttcccccccaagcctaaggacaccctgatgatcagcagaacccccgaggtgacctgcgtggtggtggatgtgagccacgaggaccctgaggtgaagttcaactggtacgtggacggcgtggaggtgcacaatgccaagaccaagcccagggaggagcagtacaacagcacctaccgggtggtgtccgtgctgaccgtgctgcaccaggattggctgaacggcaaggagtacaagtgcaaggtgtccaacaaggccctgcctgcccctatcgagaaaaccatcagcaaggccaagggccagcccagagagccccaggtgtacaccctgccccctagcagagatgagctgaccaagaaccaggtgtccctgacctgcctggtgaagggcttctaccccagcgacatcgccgtggagtgggagagcaacggccagcccgagaacaactacaagaccaccccccctgtgctggacagcgatggcagcttcttcctgtacagcaagctgaccgtggacaagagcagatggcagcagggcaacgtgttcagctgcagcgtgatgcacgaggccctgcacaatcactacacccagaagagcctgagcctgtcccctggcaagtga

SEQ ID NO: 49 - DNA, 1026 bp, Artificial Sequence
  Synthetic
gacatccagatgacccagagccccagcagcctgagcgcctctgtgggcgatagagtgaccatcacctgcagagccagccaggccatcgacagctacctgcactggtatcagcagaagcctggcaaggcccctaagctgctgatctacagcgccagcaatctggagaccgccgtgcctagcagattcagcggcagcggctccggcaccgacttcaccctgaccatcagcagcctgctgcctgaggatttcgccacctactactgccagcaggtggtgtggagacctttcaccttcggccagggcaccaaggtggagatcaagcgggtggagcccaagagcagcgataagacccacacctgccccccctgccctgcccccgagctgctgggcggacccagcgtgttcctgttcccccccaagcctaaggacaccctgatgatcagcagaacccccgaggtgacctgcgtggtggtggatgtgagccacgaggaccctgaggtgaagttcaactggtacgtggacggcgtggaggtgcacaatgccaagaccaagcccagggaggagcagtacaacagcacctaccgggtggtgtccgtgctgaccgtgctgcaccaggattggctgaacggcaaggagtacaagtgcaaggtgtccaacaaggccctgcctgcccctatcgagaaaaccatcagcaaggccaagggccagcccagagagccccaggtgtacaccctgccccctagcagagatgagctgaccaagaaccaggtgtccctgacctgcctggtgaagggcttctaccccagcgacatcgccgtggagtgggagagcaacggccagcccgagaacaactacaagaccaccccccctgtgctggacagcgatggcagcttcttcctgtacagcaagctgaccgtggacaagagcagatggcagcagggcaacgtgttcagctgcagcgtgatgcacgaggccctgcacaatcactacacccagaagagcctgagcctgtcccctggcaagtga

SEQ ID NO: 50 - DNA, 1026 bp, Artificial Sequence
  Synthetic
gacatccagatgacccagagccccagcagcctgagcgcctctgtgggcgatagagtgaccatcacctgcagagccagccaggccatcgacagctacctgcactggtatcagcagaagcctggcaaggcccctaagctgctgatctacagcgccagcaatctggagaccagcgtgcctagcagattcagcggcagcggctccggcaccgacttcaccctgaccatcagcagcctgctgcctgaggatttcgccacctactactgccagcaggtggtgtggagacctttcaccttcggccagggcaccaaggtggagatcaagcgggtggagcccaagagcagcgataagacccacacctgccccccctgccctgcccccgagctgctgggcggacccagcgtgttcctgttcccccccaagcctaaggacaccctgatgatcagcagaacccccgaggtgacctgcgtggtggtggatgtgagccacgaggaccctgaggtgaagttcaactggtacgtggacggcgtggaggtgcacaatgccaagaccaagcccagggaggagcagtacaacagcacctaccgggtggtgtccgtgctgaccgtgctgcaccaggattggctgaacggcaaggagtacaagtgcaaggtgtccaacaaggccctgcctgcccctatcgagaaaaccatcagcaaggccaagggccagcccagagagccccaggtgtacaccctgccccctagcagagatgagctgaccaagaaccaggtgtccctgacctgcctggtgaagggcttctaccccagcgacatcgccgtggagtgggagagcaacggccagcccgagaacaactacaagaccaccccccctgtgctggacagcgatggcagcttcttcctgtacagcaagctgaccgtggacaagagcagatggcagcagggcaacgtgttcagctgcagcgtgatgcacgaggccctgcacaatcactacacccagaagagcctgagcctgtcccctggcaagtga

SEQ ID NO: 51 - DNA, 1026 bp, Artificial Sequence
  Synthetic
gacatccagatgacccagagccccagcagcctgagcgcctctgtgggcgatagagtgaccatcacctgcagagccagccaggccatcgacagctacctgcactggtatcagcagaagcctggcaaggcccctaagctgctgatctacagcgccagcaatctggagaccctggtgcctagcagattcagcggcagcggctccggcaccgacttcaccctgaccatcagcagcctgctgcctgaggatttcgccacctactactgccagcaggtggtgtggagacctttcaccttcggccagggcaccaaggtggagatcaagcgggtggagcccaagagcagcgataagacccacacctgccccccctgccctgcccccgagctgctgggcggacccagcgtgttcctgttcccccccaagcctaaggacaccctgatgatcagcagaacccccgaggtgacctgcgtggtggtggatgtgagccacgaggaccctgaggtgaagttcaactggtacgtggacggcgtggaggtgcacaatgccaagaccaagcccagggaggagcagtacaacagcacctaccgggtggtgtccgtgctgaccgtgctgcaccaggattggctgaacggcaaggagtacaagtgcaaggtgtccaacaaggccctgcctgcccctatcgagaaaaccatcagcaaggccaagggccagcccagagagccccaggtgtacaccctgccccctagcagagatgagctgaccaagaaccaggtgtccctgacctgcctggtgaagggcttctaccccagcgacatcgccgtggagtgggagagcaacggccagcccgagaacaactacaagaccaccccccctgtgctggacagcgatggcagcttcttcctgtacagcaagctgaccgtggacaagagcagatggcagcagggcaacgtgttcagctgcagcgtgatgcacgaggccctgcacaatcactacacccagaagagcctgagcctgtcccctggcaagtga

SEQ ID NO: 52 - DNA, 1026 bp, Artificial Sequence
  Synthetic
gacatccagatgacccagagccccagcagcctgagcgcctctgtgggcgatagagtgaccatcacctgcagagccagccaggccatcgacagctacctgcactggtatcagcagaagcctggcaaggcccctaagctgctgatctacagcgccagcaatctggagacctacgtgcctagcagattcagcggcagcggctccggcaccgacttcaccctgaccatcagcagcctgctgcctgaggatttcgccacctactactgccagcaggtggtgtggagacctttcaccttcggccagggcaccaaggtggagatcaagcgggtggagcccaagagcagcgataagacccacacctgccccccctgccctgcccccgagctgctgggcggacccagcgtgttcctgttcccccccaagcctaaggacaccctgatgatcagcagaacccccgaggtgacctgcgtggtggtggatgtgagccacgaggaccctgaggtgaagttcaactggtacgtggacggcgtggaggtgcacaatgccaagaccaagcccagggaggagcagtacaacagcacctaccgggtggtgtccgtgctgaccgtgctgcaccaggattggctgaacggcaaggagtacaagtgcaaggtgtccaacaaggccctgcctgcccctatcgagaaaaccatcagcaaggccaagggccagcccagagagccccaggtgtacaccctgccccctagcagagatgagctgaccaagaaccaggtgtccctgacctgcctggtgaagggcttctaccccagcgacatcgccgtggagtgggagagcaacggccagcccgagaacaactacaagaccaccccccctgtgctggacagcgatggcagcttcttcctgtacagcaagctgaccgtggacaagagcagatggcagcagggcaacgtgttcagctgcagcgtgatgcacgaggccctgcacaatcactacacccagaagagcctgagcctgtcccctggcaagtga

SEQ ID NO: 53 - DNA, 1026 bp, Artificial Sequence
  Synthetic
gacatccagatgacccagagccccagcagcctgagcgcctctgtgggcgatagagtgaccatcacctgcagagccagccaggccatcgacagctacctgcactggtatcagcagaagcctggcaaggcccctaagctgctgatctacagcgccagcaatctggagaccggcgtgctgagcagattcagcggcagcggctccggcaccgacttcaccctgaccatcagcagcctgctgcctgaggatttcgccacctactactgccagcaggtggtgtggagacctttcaccttcggccagggcaccaaggtggagatcaagcgggtggagcccaagagcagcgataagacccacacctgccccccctgccctgcccccgagctgctgggcggacccagcgtgttcctgttcccccccaagcctaaggacaccctgatgatcagcagaacccccgaggtgacctgcgtggtggtggatgtgagccacgaggaccctgaggtgaagttcaactggtacgtggacggcgtggaggtgcacaatgccaagaccaagcccagggaggagcagtacaacagcacctaccgggtggtgtccgtgctgaccgtgctgcaccaggattggctgaacggcaaggagtacaagtgcaaggtgtccaacaaggccctgcctgcccctatcgagaaaaccatcagcaaggccaagggccagcccagagagccccaggtgtacaccctgccccctagcagagatgagctgaccaagaaccaggtgtccctgacctgcctggtgaagggcttctaccccagcgacatcgccgtggagtgggagagcaacggccagcccgagaacaactacaagaccaccccccctgtgctggacagcgatggcagcttcttcctgtacagcaagctgaccgtggacaagagcagatggcagcagggcaacgtgttcagctgcagcgtgatgcacgaggccctgcacaatcactacacccagaagagcctgagcctgtcccctggcaagtga

SEQ ID NO: 54 - DNA, 1026 bp, Artificial Sequence
  Synthetic
gacatccagatgacccagagccccagcagcctgagcgcctctgtgggcgatagagtgaccatcacctgcagagccagccaggccatcgacagctacctgcactggtatcagcagaagcctggcaaggcccctaagctgctgatctacagcgccagcaatctggagaccaaggtgcctagcagattcagcggcagcggctccggcaccgacttcaccctgaccatcagcagcctgctgcctgaggatttcgccacctactactgccagcaggtggtgtggagacctttcaccttcggccagggcaccaaggtggagatcaagcgggtggagcccaagagcagcgataagacccacacctgccccccctgccctgcccccgagctgctgggcggacccagcgtgttcctgttcccccccaagcctaaggacaccctgatgatcagcagaacccccgaggtgacctgcgtggtggtggatgtgagccacgaggaccctgaggtgaagttcaactggtacgtggacggcgtggaggtgcacaatgccaagaccaagcccagggaggagcagtacaacagcacctaccgggtggtgtccgtgctgaccgtgctgcaccaggattggctgaacggcaaggagtacaagtgcaaggtgtccaacaaggccctgcctgcccctatcgagaaaaccatcagcaaggccaagggccagcccagagagccccaggtgtacaccctgccccctagcagagatgagctgaccaagaaccaggtgtccctgacctgcctggtgaagggcttctaccccagcgacatcgccgtggagtgggagagcaacggccagcccgagaacaactacaagaccaccccccctgtgctggacagcgatggcagcttcttcctgtacagcaagctgaccgtggacaagagcagatggcagcagggcaacgtgttcagctgcagcgtgatgcacgaggccctgcacaatcactacacccagaagagcctgagcctgtcccctggcaagtga

SEQ ID NO: 55 - DNA, 1026 bp, Artificial Sequence
  Synthetic
gacatccagatgacccagagccccagcagcctgagcgcctctgtgggcgatagagtgaccatcacctgcagagccagccaggccatcgacagctacctgcactggtatcagcagaagcctggcaaggcccctaagctgctgatctacagcgccagcaatctggagacccaggtgcctagcagattcagcggcagcggctccggcaccgacttcaccctgaccatcagcagcctgctgcctgaggatttcgccacctactactgccagcaggtggtgtggagacctttcaccttcggccagggcaccaaggtggagatcaagcgggtggagcccaagagcagcgataagacccacacctgccccccctgccctgcccccgagctgctgggcggacccagcgtgttcctgttcccccccaagcctaaggacaccctgatgatcagcagaacccccgaggtgacctgcgtggtggtggatgtgagccacgaggaccctgaggtgaagttcaactggtacgtggacggcgtggaggtgcacaatgccaagaccaagcccagggaggagcagtacaacagcacctaccgggtggtgtccgtgctgaccgtgctgcaccaggattggctgaacggcaaggagtacaagtgcaaggtgtccaacaaggccctgcctgcccctatcgagaaaaccatcagcaaggccaagggccagcccagagagccccaggtgtacaccctgccccctagcagagatgagctgaccaagaaccaggtgtccctgacctgcctggtgaagggcttctaccccagcgacatcgccgtggagtgggagagcaacggccagcccgagaacaactacaagaccaccccccctgtgctggacagcgatggcagcttcttcctgtacagcaagctgaccgtggacaagagcagatggcagcagggcaacgtgttcagctgcagcgtgatgcacgaggccctgcacaatcactacacccagaagagcctgagcctgtcccctggcaagtga

SEQ ID NO: 56 - DNA, 1026 bp, Artificial Sequence
  Synthetic
gacatccagatgacccagagccccagcagcctgagcgcctctgtgggcgatagagtgaccatcacctgcagagccagccaggccatcgacagctacctgcactggtatcagcagaagcctggcaaggcccctaagctgctgatctacagcgccagcaatctggagacccacgtgcctagcagattcagcggcagcggctccggcaccgacttcaccctgaccatcagcagcctgctgcctgaggatttcgccacctactactgccagcaggtggtgtggagacctttcaccttcggccagggcaccaaggtggagatcaagcgggtggagcccaagagcagcgataagacccacacctgccccccctgccctgcccccgagctgctgggcggacccagcgtgttcctgttcccccccaagcctaaggacaccctgatgatcagcagaacccccgaggtgacctgcgtggtggtggatgtgagccacgaggaccctgaggtgaagttcaactggtacgtggacggcgtggaggtgcacaatgccaagaccaagcccagggaggagcagtacaacagcacctaccgggtggtgtccgtgctgaccgtgctgcaccaggattggctgaacggcaaggagtacaagtgcaaggtgtccaacaaggccctgcctgcccctatcgagaaaaccatcagcaaggccaagggccagcccagagagccccaggtgtacaccctgccccctagcagagatgagctgaccaagaaccaggtgtccctgacctgcctggtgaagggcttctaccccagcgacatcgccgtggagtgggagagcaacggccagcccgagaacaactacaagaccaccccccctgtgctggacagcgatggcagcttcttcctgtacagcaagctgaccgtggacaagagcagatggcagcagggcaacgtgttcagctgcagcgtgatgcacgaggccctgcacaatcactacacccagaagagcctgagcctgtcccctggcaagtga

SEQ ID NO: 57 - DNA, 1026 bp, Artificial Sequence
  Synthetic
gacatccagatgacccagagccccagcagcctgagcgcctctgtgggcgatagagtgaccatcacctgcagagccagccaggccatcgacagctacctgcactggtatcagcagaagcctggcaaggcccctaagctgctgatctacagcgccagcaatctggagacccccgtgcctagcagattcagcggcagcggctccggcaccgacttcaccctgaccatcagcagcctgctgcctgaggatttcgccacctactactgccagcaggtggtgtggagacctttcaccttcggccagggcaccaaggtggagatcaagcgggtggagcccaagagcagcgataagacccacacctgccccccctgccctgcccccgagctgctgggcggacccagcgtgttcctgttcccccccaagcctaaggacaccctgatgatcagcagaacccccgaggtgacctgcgtggtggtggatgtgagccacgaggaccctgaggtgaagttcaactggtacgtggacggcgtggaggtgcacaatgccaagaccaagcccagggaggagcagtacaacagcacctaccgggtggtgtccgtgctgaccgtgctgcaccaggattggctgaacggcaaggagtacaagtgcaaggtgtccaacaaggccctgcctgcccctatcgagaaaaccatcagcaaggccaagggccagcccagagagccccaggtgtacaccctgccccctagcagagatgagctgaccaagaaccaggtgtccctgacctgcctggtgaagggcttctaccccagcgacatcgccgtggagtgggagagcaacggccagcccgagaacaactacaagaccaccccccctgtgctggacagcgatggcagcttcttcctgtacagcaagctgaccgtggacaagagcagatggcagcagggcaacgtgttcagctgcagcgtgatgcacgaggccctgcacaatcactacacccagaagagcctgagcctgtcccctggcaagtga

SEQ ID NO: 58 - DNA, 1026 bp, Artificial Sequence
  Synthetic
gacatccagatgacccagagccccagcagcctgagcgcctctgtgggcgatagagtgaccatcacctgcagagccagccaggccatcgacagctacctgcactggtatcagcagaagcctggcaaggcccctaagctgctgatctacagcgccagcaatctggagaccggcgcccctagcagattcagcggcagcggctccggcaccgacttcaccctgaccatcagcagcctgctgcctgaggatttcgccacctactactgccagcaggtggtgtggagacctttcaccttcggccagggcaccaaggtggagatcaagcgggtggagcccaagagcagcgataagacccacacctgccccccctgccctgcccccgagctgctgggcggacccagcgtgttcctgttcccccccaagcctaaggacaccctgatgatcagcagaacccccgaggtgacctgcgtggtggtggatgtgagccacgaggaccctgaggtgaagttcaactggtacgtggacggcgtggaggtgcacaatgccaagaccaagcccagggaggagcagtacaacagcacctaccgggtggtgtccgtgctgaccgtgctgcaccaggattggctgaacggcaaggagtacaagtgcaaggtgtccaacaaggccctgcctgcccctatcgagaaaaccatcagcaaggccaagggccagcccagagagccccaggtgtacaccctgccccctagcagagatgagctgaccaagaaccaggtgtccctgacctgcctggtgaagggcttctaccccagcgacatcgccgtggagtgggagagcaacggccagcccgagaacaactacaagaccaccccccctgtgctggacagcgatggcagcttcttcctgtacagcaagctgaccgtggacaagagcagatggcagcagggcaacgtgttcagctgcagcgtgatgcacgaggccctgcacaatcactacacccagaagagcctgagcctgtcccctggcaagtga

SEQ ID NO: 59 - DNA, 1026 bp, Artificial Sequence
  Synthetic
gacatccagatgacccagagccccagcagcctgagcgcctctgtgggcgatagagtgaccatcacctgcagagccagccaggccatcgacagctacctgcactggtatcagcagaagcctggcaaggcccctaagctgctgatctacagcgccagcaatctggagaccggcagccctagcagattcagcggcagcggctccggcaccgacttcaccctgaccatcagcagcctgctgcctgaggatttcgccacctactactgccagcaggtggtgtggagacctttcaccttcggccagggcaccaaggtggagatcaagcgggtggagcccaagagcagcgataagacccacacctgccccccctgccctgcccccgagctgctgggcggacccagcgtgttcctgttcccccccaagcctaaggacaccctgatgatcagcagaacccccgaggtgacctgcgtggtggtggatgtgagccacgaggaccctgaggtgaagttcaactggtacgtggacggcgtggaggtgcacaatgccaagaccaagcccagggaggagcagtacaacagcacctaccgggtggtgtccgtgctgaccgtgctgcaccaggattggctgaacggcaaggagtacaagtgcaaggtgtccaacaaggccctgcctgcccctatcgagaaaaccatcagcaaggccaagggccagcccagagagccccaggtgtacaccctgccccctagcagagatgagctgaccaagaaccaggtgtccctgacctgcctggtgaagggcttctaccccagcgacatcgccgtggagtgggagagcaacggccagcccgagaacaactacaagaccaccccccctgtgctggacagcgatggcagcttcttcctgtacagcaagctgaccgtggacaagagcagatggcagcagggcaacgtgttcagctgcagcgtgatgcacgaggccctgcacaatcactacacccagaagagcctgagcctgtcccctggcaagtga

SEQ ID NO: 60 - DNA, 1026 bp, Artificial Sequence
  Synthetic
gacatccagatgacccagagccccagcagcctgagcgcctctgtgggcgatagagtgaccatcacctgcagagccagccaggccatcgacagctacctgcactggtatcagcagaagcctggcaaggcccctaagctgctgatctacagcgccagcaatctggagaccggctaccctagcagattcagcggcagcggctccggcaccgacttcaccctgaccatcagcagcctgctgcctgaggatttcgccacctactactgccagcaggtggtgtggagacctttcaccttcggccagggcaccaaggtggagatcaagcgggtggagcccaagagcagcgataagacccacacctgccccccctgccctgcccccgagctgctgggcggacccagcgtgttcctgttcccccccaagcctaaggacaccctgatgatcagcagaacccccgaggtgacctgcgtggtggtggatgtgagccacgaggaccctgaggtgaagttcaactggtacgtggacggcgtggaggtgcacaatgccaagaccaagcccagggaggagcagtacaacagcacctaccgggtggtgtccgtgctgaccgtgctgcaccaggattggctgaacggcaaggagtacaagtgcaaggtgtccaacaaggccctgcctgcccctatcgagaaaaccatcagcaaggccaagggccagcccagagagccccaggtgtacaccctgccccctagcagagatgagctgaccaagaaccaggtgtccctgacctgcctggtgaagggcttctaccccagcgacatcgccgtggagtgggagagcaacggccagcccgagaacaactacaagaccaccccccctgtgctggacagcgatggcagcttcttcctgtacagcaagctgaccgtggacaagagcagatggcagcagggcaacgtgttcagctgcagcgtgatgcacgaggccctgcacaatcactacacccagaagagcctgagcctgtcccctggcaagtga

SEQ ID NO: 61 - DNA, 1026 bp, Artificial Sequence
  Synthetic
gacatccagatgacccagagccccagcagcctgagcgcctctgtgggcgatagagtgaccatcacctgcagagccagccaggccatcgacagctacctgcactggtatcagcagaagcctggcaaggcccctaagctgctgatctacagcgccagcaatctggagaccggcgaccctagcagattcagcggcagcggctccggcaccgacttcaccctgaccatcagcagcctgctgcctgaggatttcgccacctactactgccagcaggtggtgtggagacctttcaccttcggccagggcaccaaggtggagatcaagcgggtggagcccaagagcagcgataagacccacacctgccccccctgccctgcccccgagctgctgggcggacccagcgtgttcctgttcccccccaagcctaaggacaccctgatgatcagcagaacccccgaggtgacctgcgtggtggtggatgtgagccacgaggaccctgaggtgaagttcaactggtacgtggacggcgtggaggtgcacaatgccaagaccaagcccagggaggagcagtacaacagcacctaccgggtggtgtccgtgctgaccgtgctgcaccaggattggctgaacggcaaggagtacaagtgcaaggtgtccaacaaggccctgcctgcccctatcgagaaaaccatcagcaaggccaagggccagcccagagagccccaggtgtacaccctgccccctagcagagatgagctgaccaagaaccaggtgtccctgacctgcctggtgaagggcttctaccccagcgacatcgccgtggagtgggagagcaacggccagcccgagaacaactacaagaccaccccccctgtgctggacagcgatggcagcttcttcctgtacagcaagctgaccgtggacaagagcagatggcagcagggcaacgtgttcagctgcagcgtgatgcacgaggccctgcacaatcactacacccagaagagcctgagcctgtcccctggcaagtga

SEQ ID NO: 62 - DNA, 1026 bp, Artificial Sequence
  Synthetic
gacatccagatgacccagagccccagcagcctgagcgcctctgtgggcgatagagtgaccatcacctgcagagccagccaggccatcgacagctacctgcactggtatcagcagaagcctggcaaggcccctaagctgctgatctacagcgccagcaatctggagaccggcaagcctagcagattcagcggcagcggctccggcaccgacttcaccctgaccatcagcagcctgctgcctgaggatttcgccacctactactgccagcaggtggtgtggagacctttcaccttcggccagggcaccaaggtggagatcaagcgggtggagcccaagagcagcgataagacccacacctgccccccctgccctgcccccgagctgctgggcggacccagcgtgttcctgttcccccccaagcctaaggacaccctgatgatcagcagaacccccgaggtgacctgcgtggtggtggatgtgagccacgaggaccctgaggtgaagttcaactggtacgtggacggcgtggaggtgcacaatgccaagaccaagcccagggaggagcagtacaacagcacctaccgggtggtgtccgtgctgaccgtgctgcaccaggattggctgaacggcaaggagtacaagtgcaaggtgtccaacaaggccctgcctgcccctatcgagaaaaccatcagcaaggccaagggccagcccagagagccccaggtgtacaccctgccccctagcagagatgagctgaccaagaaccaggtgtccctgacctgcctggtgaagggcttctaccccagcgacatcgccgtggagtgggagagcaacggccagcccgagaacaactacaagaccaccccccctgtgctggacagcgatggcagcttcttcctgtacagcaagctgaccgtggacaagagcagatggcagcagggcaacgtgttcagctgcagcgtgatgcacgaggccctgcacaatcactacacccagaagagcctgagcctgtcccctggcaagtga

SEQ ID NO: 63 - DNA, 1026 bp, Artificial Sequence
  Synthetic
gacatccagatgacccagagccccagcagcctgagcgcctctgtgggcgatagagtgaccatcacctgcagagccagccaggccatcgacagctacctgcactggtatcagcagaagcctggcaaggcccctaagctgctgatctacagcgccagcaatctggagaccggccagcctagcagattcagcggcagcggctccggcaccgacttcaccctgaccatcagcagcctgctgcctgaggatttcgccacctactactgccagcaggtggtgtggagacctttcaccttcggccagggcaccaaggtggagatcaagcgggtggagcccaagagcagcgataagacccacacctgccccccctgccctgcccccgagctgctgggcggacccagcgtgttcctgttcccccccaagcctaaggacaccctgatgatcagcagaacccccgaggtgacctgcgtggtggtggatgtgagccacgaggaccctgaggtgaagttcaactggtacgtggacggcgtggaggtgcacaatgccaagaccaagcccagggaggagcagtacaacagcacctaccgggtggtgtccgtgctgaccgtgctgcaccaggattggctgaacggcaaggagtacaagtgcaaggtgtccaacaaggccctgcctgcccctatcgagaaaaccatcagcaaggccaagggccagcccagagagccccaggtgtacaccctgccccctagcagagatgagctgaccaagaaccaggtgtccctgacctgcctggtgaagggcttctaccccagcgacatcgccgtggagtgggagagcaacggccagcccgagaacaactacaagaccaccccccctgtgctggacagcgatggcagcttcttcctgtacagcaagctgaccgtggacaagagcagatggcagcagggcaacgtgttcagctgcagcgtgatgcacgaggccctgcacaatcactacacccagaagagcctgagcctgtcccctggcaagtga

SEQ ID NO: 64 - DNA, 1026 bp, Artificial Sequence
  Synthetic
gacatccagatgacccagagccccagcagcctgagcgcctctgtgggcgatagagtgaccatcacctgcagagccagccaggccatcgacagctacctgcactggtatcagcagaagcctggcaaggcccctaagctgctgatctacagcgccagcaatctggagaccggccaccctagcagattcagcggcagcggctccggcaccgacttcaccctgaccatcagcagcctgctgcctgaggatttcgccacctactactgccagcaggtggtgtggagacctttcaccttcggccagggcaccaaggtggagatcaagcgggtggagcccaagagcagcgataagacccacacctgccccccctgccctgcccccgagctgctgggcggacccagcgtgttcctgttcccccccaagcctaaggacaccctgatgatcagcagaacccccgaggtgacctgcgtggtggtggatgtgagccacgaggaccctgaggtgaagttcaactggtacgtggacggcgtggaggtgcacaatgccaagaccaagcccagggaggagcagtacaacagcacctaccgggtggtgtccgtgctgaccgtgctgcaccaggattggctgaacggcaaggagtacaagtgcaaggtgtccaacaaggccctgcctgcccctatcgagaaaaccatcagcaaggccaagggccagcccagagagccccaggtgtacaccctgccccctagcagagatgagctgaccaagaaccaggtgtccctgacctgcctggtgaagggcttctaccccagcgacatcgccgtggagtgggagagcaacggccagcccgagaacaactacaagaccaccccccctgtgctggacagcgatggcagcttcttcctgtacagcaagctgaccgtggacaagagcagatggcagcagggcaacgtgttcagctgcagcgtgatgcacgaggccctgcacaatcactacacccagaagagcctgagcctgtcccctggcaagtga

SEQ ID NO: 65 - DNA, 1026 bp, Artificial Sequence
  Synthetic
gacatccagatgacccagagccccagcagcctgagcgcctctgtgggcgatagagtgaccatcacctgcagagccagccaggccatcgacagctacctgcactggtatcagcagaagcctggcaaggcccctaagctgctgatctacagcgccagcaatctggagaccggcccccctagcagattcagcggcagcggctccggcaccgacttcaccctgaccatcagcagcctgctgcctgaggatttcgccacctactactgccagcaggtggtgtggagacctttcaccttcggccagggcaccaaggtggagatcaagcgggtggagcccaagagcagcgataagacccacacctgccccccctgccctgcccccgagctgctgggcggacccagcgtgttcctgttcccccccaagcctaaggacaccctgatgatcagcagaacccccgaggtgacctgcgtggtggtggatgtgagccacgaggaccctgaggtgaagttcaactggtacgtggacggcgtggaggtgcacaatgccaagaccaagcccagggaggagcagtacaacagcacctaccgggtggtgtccgtgctgaccgtgctgcaccaggattggctgaacggcaaggagtacaagtgcaaggtgtccaacaaggccctgcctgcccctatcgagaaaaccatcagcaaggccaagggccagcccagagagccccaggtgtacaccctgccccctagcagagatgagctgaccaagaaccaggtgtccctgacctgcctggtgaagggcttctaccccagcgacatcgccgtggagtgggagagcaacggccagcccgagaacaactacaagaccaccccccctgtgctggacagcgatggcagcttcttcctgtacagcaagctgaccgtggacaagagcagatggcagcagggcaacgtgttcagctgcagcgtgatgcacgaggccctgcacaatcactacacccagaagagcctgagcctgtcccctggcaagtga

SEQ ID NO: 66 - DNA, 1026 bp, Artificial Sequence
  Synthetic
gacatccagatgacccagagccccagcagcctgagcgcctctgtgggcgatagagtgaccatcacctgcagagccagccaggccatcgacagctacctgcactggtatcagcagaagcctggcaaggcccctaagctgctgatctacagcgccagcaatctggagaccggcgtggccagcagattcagcggcagcggctccggcaccgacttcaccctgaccatcagcagcctgctgcctgaggatttcgccacctactactgccagcaggtggtgtggagacctttcaccttcggccagggcaccaaggtggagatcaagcgggtggagcccaagagcagcgataagacccacacctgccccccctgccctgcccccgagctgctgggcggacccagcgtgttcctgttcccccccaagcctaaggacaccctgatgatcagcagaacccccgaggtgacctgcgtggtggtggatgtgagccacgaggaccctgaggtgaagttcaactggtacgtggacggcgtggaggtgcacaatgccaagaccaagcccagggaggagcagtacaacagcacctaccgggtggtgtccgtgctgaccgtgctgcaccaggattggctgaacggcaaggagtacaagtgcaaggtgtccaacaaggccctgcctgcccctatcgagaaaaccatcagcaaggccaagggccagcccagagagccccaggtgtacaccctgccccctagcagagatgagctgaccaagaaccaggtgtccctgacctgcctggtgaagggcttctaccccagcgacatcgccgtggagtgggagagcaacggccagcccgagaacaactacaagaccaccccccctgtgctggacagcgatggcagcttcttcctgtacagcaagctgaccgtggacaagagcagatggcagcagggcaacgtgttcagctgcagcgtgatgcacgaggccctgcacaatcactacacccagaagagcctgagcctgtcccctggcaagtga

SEQ ID NO: 67 - DNA, 1026 bp, Artificial Sequence
  Synthetic
gacatccagatgacccagagccccagcagcctgagcgcctctgtgggcgatagagtgaccatcacctgcagagccagccaggccatcgacagctacctgcactggtatcagcagaagcctggcaaggcccctaagctgctgatctacagcgccagcaatctggagaccggcgtgagcagcagattcagcggcagcggctccggcaccgacttcaccctgaccatcagcagcctgctgcctgaggatttcgccacctactactgccagcaggtggtgtggagacctttcaccttcggccagggcaccaaggtggagatcaagcgggtggagcccaagagcagcgataagacccacacctgccccccctgccctgcccccgagctgctgggcggacccagcgtgttcctgttcccccccaagcctaaggacaccctgatgatcagcagaacccccgaggtgacctgcgtggtggtggatgtgagccacgaggaccctgaggtgaagttcaactggtacgtggacggcgtggaggtgcacaatgccaagaccaagcccagggaggagcagtacaacagcacctaccgggtggtgtccgtgctgaccgtgctgcaccaggattggctgaacggcaaggagtacaagtgcaaggtgtccaacaaggccctgcctgcccctatcgagaaaaccatcagcaaggccaagggccagcccagagagccccaggtgtacaccctgccccctagcagagatgagctgaccaagaaccaggtgtccctgacctgcctggtgaagggcttctaccccagcgacatcgccgtggagtgggagagcaacggccagcccgagaacaactacaagaccaccccccctgtgctggacagcgatggcagcttcttcctgtacagcaagctgaccgtggacaagagcagatggcagcagggcaacgtgttcagctgcagcgtgatgcacgaggccctgcacaatcactacacccagaagagcctgagcctgtcccctggcaagtga

SEQ ID NO: 68 - DNA, 1026 bp, Artificial Sequence
  Synthetic
gacatccagatgacccagagccccagcagcctgagcgcctctgtgggcgatagagtgaccatcacctgcagagccagccaggccatcgacagctacctgcactggtatcagcagaagcctggcaaggcccctaagctgctgatctacagcgccagcaatctggagaccggcgtgcctagcagattcagcggcagcggctccggcaccgacttcaccctgaccatcagcagcctgcagcctgaggatttcgccacctactactgccagcaggtggtgtggagacctttcaccttcggccagggcaccaaggtggagatcaagcgggtggagcccaagagcagcgataagacccacacctgccccccctgccctgcccccgagctgctgggcggacccagcgtgttcctgttcccccccaagcctaaggacaccctgatgatcagcagaacccccgaggtgacctgcgtggtggtggatgtgagccacgaggaccctgaggtgaagttcaactggtacgtggacggcgtggaggtgcacaatgccaagaccaagcccagggaggagcagtacaacagcacctaccgggtggtgtccgtgctgaccgtgctgcaccaggattggctgaacggcaaggagtacaagtgcaaggtgtccaacaaggccctgcctgcccctatcgagaaaaccatcagcaaggccaagggccagcccagagagccccaggtgtacaccctgccccctagcagagatgagctgaccaagaaccaggtgtccctgacctgcctggtgaagggcttctaccccagcgacatcgccgtggagtgggagagcaacggccagcccgagaacaactacaagaccaccccccctgtgctggacagcgatggcagcttcttcctgtacagcaagctgaccgtggacaagagcagatggcagcagggcaacgtgttcagctgcagcgtgatgcacgaggccctgcacaatcactacacccagaagagcctgagcctgtcccctggcaagtga

SEQ ID NO: 69 - DNA, 1026 bp, Artificial Sequence
  Synthetic
gacatccagatgacccagagccccagcagcctgagcgcctctgtgggcgatagagtgaccatcacctgcagagccagccaggccatcgacagctacctgcactggtatcagcagaagcctggcaaggcccctaagctgctgatctacagcgccagcaatctggagaccggcgtgtacagcagattcagcggcagcggctccggcaccgacttcaccctgaccatcagcagcctgctgcctgaggatttcgccacctactactgccagcaggtggtgtggagacctttcaccttcggccagggcaccaaggtggagatcaagcgggtggagcccaagagcagcgataagacccacacctgccccccctgccctgcccccgagctgctgggcggacccagcgtgttcctgttcccccccaagcctaaggacaccctgatgatcagcagaacccccgaggtgacctgcgtggtggtggatgtgagccacgaggaccctgaggtgaagttcaactggtacgtggacggcgtggaggtgcacaatgccaagaccaagcccagggaggagcagtacaacagcacctaccgggtggtgtccgtgctgaccgtgctgcaccaggattggctgaacggcaaggagtacaagtgcaaggtgtccaacaaggccctgcctgcccctatcgagaaaaccatcagcaaggccaagggccagcccagagagccccaggtgtacaccctgccccctagcagagatgagctgaccaagaaccaggtgtccctgacctgcctggtgaagggcttctaccccagcgacatcgccgtggagtgggagagcaacggccagcccgagaacaactacaagaccaccccccctgtgctggacagcgatggcagcttcttcctgtacagcaagctgaccgtggacaagagcagatggcagcagggcaacgtgttcagctgcagcgtgatgcacgaggccctgcacaatcactacacccagaagagcctgagcctgtcccctggcaagtga

SEQ ID NO: 70 - DNA, 1026 bp, Artificial Sequence
  Synthetic
gacatccagatgacccagagccccagcagcctgagcgcctctgtgggcgatagagtgaccatcacctgcagagccagccaggccatcgacagctacctgcactggtatcagcagaagcctggcaaggcccctaagctgctgatctacagcgccagcaatctggagaccggcgtggacagcagattcagcggcagcggctccggcaccgacttcaccctgaccatcagcagcctgctgcctgaggatttcgccacctactactgccagcaggtggtgtggagacctttcaccttcggccagggcaccaaggtggagatcaagcgggtggagcccaagagcagcgataagacccacacctgccccccctgccctgcccccgagctgctgggcggacccagcgtgttcctgttcccccccaagcctaaggacaccctgatgatcagcagaacccccgaggtgacctgcgtggtggtggatgtgagccacgaggaccctgaggtgaagttcaactggtacgtggacggcgtggaggtgcacaatgccaagaccaagcccagggaggagcagtacaacagcacctaccgggtggtgtccgtgctgaccgtgctgcaccaggattggctgaacggcaaggagtacaagtgcaaggtgtccaacaaggccctgcctgcccctatcgagaaaaccatcagcaaggccaagggccagcccagagagccccaggtgtacaccctgccccctagcagagatgagctgaccaagaaccaggtgtccctgacctgcctggtgaagggcttctaccccagcgacatcgccgtggagtgggagagcaacggccagcccgagaacaactacaagaccaccccccctgtgctggacagcgatggcagcttcttcctgtacagcaagctgaccgtggacaagagcagatggcagcagggcaacgtgttcagctgcagcgtgatgcacgaggccctgcacaatcactacacccagaagagcctgagcctgtcccctggcaagtga

SEQ ID NO: 71 - DNA, 1026 bp, Artificial Sequence
  Synthetic
gacatccagatgacccagagccccagcagcctgagcgcctctgtgggcgatagagtgaccatcacctgcagagccagccaggccatcgacagctacctgcactggtatcagcagaagcctggcaaggcccctaagctgctgatctacagcgccagcaatctggagaccggcgtgaagagcagattcagcggcagcggctccggcaccgacttcaccctgaccatcagcagcctgctgcctgaggatttcgccacctactactgccagcaggtggtgtggagacctttcaccttcggccagggcaccaaggtggagatcaagcgggtggagcccaagagcagcgataagacccacacctgccccccctgccctgcccccgagctgctgggcggacccagcgtgttcctgttcccccccaagcctaaggacaccctgatgatcagcagaacccccgaggtgacctgcgtggtggtggatgtgagccacgaggaccctgaggtgaagttcaactggtacgtggacggcgtggaggtgcacaatgccaagaccaagcccagggaggagcagtacaacagcacctaccgggtggtgtccgtgctgaccgtgctgcaccaggattggctgaacggcaaggagtacaagtgcaaggtgtccaacaaggccctgcctgcccctatcgagaaaaccatcagcaaggccaagggccagcccagagagccccaggtgtacaccctgccccctagcagagatgagctgaccaagaaccaggtgtccctgacctgcctggtgaagggcttctaccccagcgacatcgccgtggagtgggagagcaacggccagcccgagaacaactacaagaccaccccccctgtgctggacagcgatggcagcttcttcctgtacagcaagctgaccgtggacaagagcagatggcagcagggcaacgtgttcagctgcagcgtgatgcacgaggccctgcacaatcactacacccagaagagcctgagcctgtcccctggcaagtga

SEQ ID NO: 72 - DNA, 1026 bp, Artificial Sequence
  Synthetic
gacatccagatgacccagagccccagcagcctgagcgcctctgtgggcgatagagtgaccatcacctgcagagccagccaggccatcgacagctacctgcactggtatcagcagaagcctggcaaggcccctaagctgctgatctacagcgccagcaatctggagaccggcgtgcagagcagattcagcggcagcggctccggcaccgacttcaccctgaccatcagcagcctgctgcctgaggatttcgccacctactactgccagcaggtggtgtggagacctttcaccttcggccagggcaccaaggtggagatcaagcgggtggagcccaagagcagcgataagacccacacctgccccccctgccctgcccccgagctgctgggcggacccagcgtgttcctgttcccccccaagcctaaggacaccctgatgatcagcagaacccccgaggtgacctgcgtggtggtggatgtgagccacgaggaccctgaggtgaagttcaactggtacgtggacggcgtggaggtgcacaatgccaagaccaagcccagggaggagcagtacaacagcacctaccgggtggtgtccgtgctgaccgtgctgcaccaggattggctgaacggcaaggagtacaagtgcaaggtgtccaacaaggccctgcctgcccctatcgagaaaaccatcagcaaggccaagggccagcccagagagccccaggtgtacaccctgccccctagcagagatgagctgaccaagaaccaggtgtccctgacctgcctggtgaagggcttctaccccagcgacatcgccgtggagtgggagagcaacggccagcccgagaacaactacaagaccaccccccctgtgctggacagcgatggcagcttcttcctgtacagcaagctgaccgtggacaagagcagatggcagcagggcaacgtgttcagctgcagcgtgatgcacgaggccctgcacaatcactacacccagaagagcctgagcctgtcccctggcaagtga

SEQ ID NO: 73 - DNA, 1026 bp, Artificial Sequence
  Synthetic
gacatccagatgacccagagccccagcagcctgagcgcctctgtgggcgatagagtgaccatcacctgcagagccagccaggccatcgacagctacctgcactggtatcagcagaagcctggcaaggcccctaagctgctgatctacagcgccagcaatctggagaccggcgtgcacagcagattcagcggcagcggctccggcaccgacttcaccctgaccatcagcagcctgctgcctgaggatttcgccacctactactgccagcaggtggtgtggagacctttcaccttcggccagggcaccaaggtggagatcaagcgggtggagcccaagagcagcgataagacccacacctgccccccctgccctgcccccgagctgctgggcggacccagcgtgttcctgttcccccccaagcctaaggacaccctgatgatcagcagaacccccgaggtgacctgcgtggtggtggatgtgagccacgaggaccctgaggtgaagttcaactggtacgtggacggcgtggaggtgcacaatgccaagaccaagcccagggaggagcagtacaacagcacctaccgggtggtgtccgtgctgaccgtgctgcaccaggattggctgaacggcaaggagtacaagtgcaaggtgtccaacaaggccctgcctgcccctatcgagaaaaccatcagcaaggccaagggccagcccagagagccccaggtgtacaccctgccccctagcagagatgagctgaccaagaaccaggtgtccctgacctgcctggtgaagggcttctaccccagcgacatcgccgtggagtgggagagcaacggccagcccgagaacaactacaagaccaccccccctgtgctggacagcgatggcagcttcttcctgtacagcaagctgaccgtggacaagagcagatggcagcagggcaacgtgttcagctgcagcgtgatgcacgaggccctgcacaatcactacacccagaagagcctgagcctgtcccctggcaagtga

SEQ ID NO: 74 - DNA, 1026 bp, Artificial Sequence
  Synthetic
gacatccagatgacccagagccccagcagcctgagcgcctctgtgggcgatagagtgaccatcacctgcagagccagccaggccatcgacagctacctgcactggtatcagcagaagcctggcaaggcccctaagctgctgatctacagcgccagcaatctggagaccggcgtgcctgccagattcagcggcagcggctccggcaccgacttcaccctgaccatcagcagcctgctgcctgaggatttcgccacctactactgccagcaggtggtgtggagacctttcaccttcggccagggcaccaaggtggagatcaagcgggtggagcccaagagcagcgataagacccacacctgccccccctgccctgcccccgagctgctgggcggacccagcgtgttcctgttcccccccaagcctaaggacaccctgatgatcagcagaacccccgaggtgacctgcgtggtggtggatgtgagccacgaggaccctgaggtgaagttcaactggtacgtggacggcgtggaggtgcacaatgccaagaccaagcccagggaggagcagtacaacagcacctaccgggtggtgtccgtgctgaccgtgctgcaccaggattggctgaacggcaaggagtacaagtgcaaggtgtccaacaaggccctgcctgcccctatcgagaaaaccatcagcaaggccaagggccagcccagagagccccaggtgtacaccctgccccctagcagagatgagctgaccaagaaccaggtgtccctgacctgcctggtgaagggcttctaccccagcgacatcgccgtggagtgggagagcaacggccagcccgagaacaactacaagaccaccccccctgtgctggacagcgatggcagcttcttcctgtacagcaagctgaccgtggacaagagcagatggcagcagggcaacgtgttcagctgcagcgtgatgcacgaggccctgcacaatcactacacccagaagagcctgagcctgtcccctggcaagtga

SEQ ID NO: 75 - DNA, 1026 bp, Artificial Sequence
  Synthetic
gacatccagatgacccagagccccagcagcctgagcgcctctgtgggcgatagagtgaccatcacctgcagagccagccaggccatcgacagctacctgcactggtatcagcagaagcctggcaaggcccctaagctgctgatctacagcgccagcaatctggagaccggcgtgcctctgagattcagcggcagcggctccggcaccgacttcaccctgaccatcagcagcctgctgcctgaggatttcgccacctactactgccagcaggtggtgtggagacctttcaccttcggccagggcaccaaggtggagatcaagcgggtggagcccaagagcagcgataagacccacacctgccccccctgccctgcccccgagctgctgggcggacccagcgtgttcctgttcccccccaagcctaaggacaccctgatgatcagcagaacccccgaggtgacctgcgtggtggtggatgtgagccacgaggaccctgaggtgaagttcaactggtacgtggacggcgtggaggtgcacaatgccaagaccaagcccagggaggagcagtacaacagcacctaccgggtggtgtccgtgctgaccgtgctgcaccaggattggctgaacggcaaggagtacaagtgcaaggtgtccaacaaggccctgcctgcccctatcgagaaaaccatcagcaaggccaagggccagcccagagagccccaggtgtacaccctgccccctagcagagatgagctgaccaagaaccaggtgtccctgacctgcctggtgaagggcttctaccccagcgacatcgccgtggagtgggagagcaacggccagcccgagaacaactacaagaccaccccccctgtgctggacagcgatggcagcttcttcctgtacagcaagctgaccgtggacaagagcagatggcagcagggcaacgtgttcagctgcagcgtgatgcacgaggccctgcacaatcactacacccagaagagcctgagcctgtcccctggcaagtga

SEQ ID NO: 76 - DNA, 1026 bp, Artificial Sequence
  Synthetic
gacatccagatgacccagagccccagcagcctgagcgcctctgtgggcgatagagtgaccatcacctgcagagccagccaggccatcgacagctacctgcactggtatcagcagaagcctggcaaggcccctaagctgctgatctacagcgccagcaatctggagaccggcgtgccttacagattcagcggcagcggctccggcaccgacttcaccctgaccatcagcagcctgctgcctgaggatttcgccacctactactgccagcaggtggtgtggagacctttcaccttcggccagggcaccaaggtggagatcaagcgggtggagcccaagagcagcgataagacccacacctgccccccctgccctgcccccgagctgctgggcggacccagcgtgttcctgttcccccccaagcctaaggacaccctgatgatcagcagaacccccgaggtgacctgcgtggtggtggatgtgagccacgaggaccctgaggtgaagttcaactggtacgtggacggcgtggaggtgcacaatgccaagaccaagcccagggaggagcagtacaacagcacctaccgggtggtgtccgtgctgaccgtgctgcaccaggattggctgaacggcaaggagtacaagtgcaaggtgtccaacaaggccctgcctgcccctatcgagaaaaccatcagcaaggccaagggccagcccagagagccccaggtgtacaccctgccccctagcagagatgagctgaccaagaaccaggtgtccctgacctgcctggtgaagggcttctaccccagcgacatcgccgtggagtgggagagcaacggccagcccgagaacaactacaagaccaccccccctgtgctggacagcgatggcagcttcttcctgtacagcaagctgaccgtggacaagagcagatggcagcagggcaacgtgttcagctgcagcgtgatgcacgaggccctgcacaatcactacacccagaagagcctgagcctgtcccctggcaagtga

SEQ ID NO: 77 - DNA, 1026 bp, Artificial Sequence
  Synthetic
gacatccagatgacccagagccccagcagcctgagcgcctctgtgggcgatagagtgaccatcacctgcagagccagccaggccatcgacagctacctgcactggtatcagcagaagcctggcaaggcccctaagctgctgatctacagcgccagcaatctggagaccggcgtgcctgacagattcagcggcagcggctccggcaccgacttcaccctgaccatcagcagcctgctgcctgaggatttcgccacctactactgccagcaggtggtgtggagacctttcaccttcggccagggcaccaaggtggagatcaagcgggtggagcccaagagcagcgataagacccacacctgccccccctgccctgcccccgagctgctgggcggacccagcgtgttcctgttcccccccaagcctaaggacaccctgatgatcagcagaacccccgaggtgacctgcgtggtggtggatgtgagccacgaggaccctgaggtgaagttcaactggtacgtggacggcgtggaggtgcacaatgccaagaccaagcccagggaggagcagtacaacagcacctaccgggtggtgtccgtgctgaccgtgctgcaccaggattggctgaacggcaaggagtacaagtgcaaggtgtccaacaaggccctgcctgcccctatcgagaaaaccatcagcaaggccaagggccagcccagagagccccaggtgtacaccctgccccctagcagagatgagctgaccaagaaccaggtgtccctgacctgcctggtgaagggcttctaccccagcgacatcgccgtggagtgggagagcaacggccagcccgagaacaactacaagaccaccccccctgtgctggacagcgatggcagcttcttcctgtacagcaagctgaccgtggacaagagcagatggcagcagggcaacgtgttcagctgcagcgtgatgcacgaggccctgcacaatcactacacccagaagagcctgagcctgtcccctggcaagtga

SEQ ID NO: 78 - DNA, 1026 bp, Artificial Sequence
  Synthetic
gacatccagatgacccagagccccagcagcctgagcgcctctgtgggcgatagagtgaccatcacctgcagagccagccaggccatcgacagctacctgcactggtatcagcagaagcctggcaaggcccctaagctgctgatctacagcgccagcaatctggagaccggcgtgcctaagagattcagcggcagcggctccggcaccgacttcaccctgaccatcagcagcctgctgcctgaggatttcgccacctactactgccagcaggtggtgtggagacctttcaccttcggccagggcaccaaggtggagatcaagcgggtggagcccaagagcagcgataagacccacacctgccccccctgccctgcccccgagctgctgggcggacccagcgtgttcctgttcccccccaagcctaaggacaccctgatgatcagcagaacccccgaggtgacctgcgtggtggtggatgtgagccacgaggaccctgaggtgaagttcaactggtacgtggacggcgtggaggtgcacaatgccaagaccaagcccagggaggagcagtacaacagcacctaccgggtggtgtccgtgctgaccgtgctgcaccaggattggctgaacggcaaggagtacaagtgcaaggtgtccaacaaggccctgcctgcccctatcgagaaaaccatcagcaaggccaagggccagcccagagagccccaggtgtacaccctgccccctagcagagatgagctgaccaagaaccaggtgtccctgacctgcctggtgaagggcttctaccccagcgacatcgccgtggagtgggagagcaacggccagcccgagaacaactacaagaccaccccccctgtgctggacagcgatggcagcttcttcctgtacagcaagctgaccgtggacaagagcagatggcagcagggcaacgtgttcagctgcagcgtgatgcacgaggccctgcacaatcactacacccagaagagcctgagcctgtcccctggcaagtga

SEQ ID NO: 79 - DNA, 1026 bp, Artificial Sequence
  Synthetic
gacatccagatgacccagagccccagcagcctgagcgcctctgtgggcgatagagtgaccatcacctgcagagccagccaggccatcgacagctacctgcactggtatcagcagaagcctggcaaggcccctaagctgctgatctacagcgccagcaatctggagaccggcgtgcctcagagattcagcggcagcggctccggcaccgacttcaccctgaccatcagcagcctgctgcctgaggatttcgccacctactactgccagcaggtggtgtggagacctttcaccttcggccagggcaccaaggtggagatcaagcgggtggagcccaagagcagcgataagacccacacctgccccccctgccctgcccccgagctgctgggcggacccagcgtgttcctgttcccccccaagcctaaggacaccctgatgatcagcagaacccccgaggtgacctgcgtggtggtggatgtgagccacgaggaccctgaggtgaagttcaactggtacgtggacggcgtggaggtgcacaatgccaagaccaagcccagggaggagcagtacaacagcacctaccgggtggtgtccgtgctgaccgtgctgcaccaggattggctgaacggcaaggagtacaagtgcaaggtgtccaacaaggccctgcctgcccctatcgagaaaaccatcagcaaggccaagggccagcccagagagccccaggtgtacaccctgccccctagcagagatgagctgaccaagaaccaggtgtccctgacctgcctggtgaagggcttctaccccagcgacatcgccgtggagtgggagagcaacggccagcccgagaacaactacaagaccaccccccctgtgctggacagcgatggcagcttcttcctgtacagcaagctgaccgtggacaagagcagatggcagcagggcaacgtgttcagctgcagcgtgatgcacgaggccctgcacaatcactacacccagaagagcctgagcctgtcccctggcaagtga

SEQ ID NO: 80 - DNA, 1026 bp, Artificial Sequence
  Synthetic
gacatccagatgacccagagccccagcagcctgagcgcctctgtgggcgatagagtgaccatcacctgcagagccagccaggccatcgacagctacctgcactggtatcagcagaagcctggcaaggcccctaagctgctgatctacagcgccagcaatctggagaccggcgtgcctcacagattcagcggcagcggctccggcaccgacttcaccctgaccatcagcagcctgctgcctgaggatttcgccacctactactgccagcaggtggtgtggagacctttcaccttcggccagggcaccaaggtggagatcaagcgggtggagcccaagagcagcgataagacccacacctgccccccctgccctgcccccgagctgctgggcggacccagcgtgttcctgttcccccccaagcctaaggacaccctgatgatcagcagaacccccgaggtgacctgcgtggtggtggatgtgagccacgaggaccctgaggtgaagttcaactggtacgtggacggcgtggaggtgcacaatgccaagaccaagcccagggaggagcagtacaacagcacctaccgggtggtgtccgtgctgaccgtgctgcaccaggattggctgaacggcaaggagtacaagtgcaaggtgtccaacaaggccctgcctgcccctatcgagaaaaccatcagcaaggccaagggccagcccagagagccccaggtgtacaccctgccccctagcagagatgagctgaccaagaaccaggtgtccctgacctgcctggtgaagggcttctaccccagcgacatcgccgtggagtgggagagcaacggccagcccgagaacaactacaagaccaccccccctgtgctggacagcgatggcagcttcttcctgtacagcaagctgaccgtggacaagagcagatggcagcagggcaacgtgttcagctgcagcgtgatgcacgaggccctgcacaatcactacacccagaagagcctgagcctgtcccctggcaagtga

SEQ ID NO: 81 - DNA, 1026 bp, Artificial Sequence
  Synthetic
gacatccagatgacccagagccccagcagcctgagcgcctctgtgggcgatagagtgaccatcacctgcagagccagccaggccatcgacagctacctgcactggtatcagcagaagcctggcaaggcccctaagctgctgatctacagcgccagcaatctggagaccggcgtgcctcccagattcagcggcagcggctccggcaccgacttcaccctgaccatcagcagcctgctgcctgaggatttcgccacctactactgccagcaggtggtgtggagacctttcaccttcggccagggcaccaaggtggagatcaagcgggtggagcccaagagcagcgataagacccacacctgccccccctgccctgcccccgagctgctgggcggacccagcgtgttcctgttcccccccaagcctaaggacaccctgatgatcagcagaacccccgaggtgacctgcgtggtggtggatgtgagccacgaggaccctgaggtgaagttcaactggtacgtggacggcgtggaggtgcacaatgccaagaccaagcccagggaggagcagtacaacagcacctaccgggtggtgtccgtgctgaccgtgctgcaccaggattggctgaacggcaaggagtacaagtgcaaggtgtccaacaaggccctgcctgcccctatcgagaaaaccatcagcaaggccaagggccagcccagagagccccaggtgtacaccctgccccctagcagagatgagctgaccaagaaccaggtgtccctgacctgcctggtgaagggcttctaccccagcgacatcgccgtggagtgggagagcaacggccagcccgagaacaactacaagaccaccccccctgtgctggacagcgatggcagcttcttcctgtacagcaagctgaccgtggacaagagcagatggcagcagggcaacgtgttcagctgcagcgtgatgcacgaggccctgcacaatcactacacccagaagagcctgagcctgtcccctggcaagtga

SEQ ID NO: 82 - DNA, 1026 bp, Artificial Sequence
  Synthetic
gacatccagatgacccagagccccagcagcctgagcgcctctgtgggcgatagagtgaccatcacctgcagagccagccaggccatcgacagctacctgcactggtatcagcagaagcctggcaaggcccctaagctgctgatctacagcgccagcaatctggagaccggcgtgcctagcgccttcagcggcagcggctccggcaccgacttcaccctgaccatcagcagcctgctgcctgaggatttcgccacctactactgccagcaggtggtgtggagacctttcaccttcggccagggcaccaaggtggagatcaagcgggtggagcccaagagcagcgataagacccacacctgccccccctgccctgcccccgagctgctgggcggacccagcgtgttcctgttcccccccaagcctaaggacaccctgatgatcagcagaacccccgaggtgacctgcgtggtggtggatgtgagccacgaggaccctgaggtgaagttcaactggtacgtggacggcgtggaggtgcacaatgccaagaccaagcccagggaggagcagtacaacagcacctaccgggtggtgtccgtgctgaccgtgctgcaccaggattggctgaacggcaaggagtacaagtgcaaggtgtccaacaaggccctgcctgcccctatcgagaaaaccatcagcaaggccaagggccagcccagagagccccaggtgtacaccctgccccctagcagagatgagctgaccaagaaccaggtgtccctgacctgcctggtgaagggcttctaccccagcgacatcgccgtggagtgggagagcaacggccagcccgagaacaactacaagaccaccccccctgtgctggacagcgatggcagcttcttcctgtacagcaagctgaccgtggacaagagcagatggcagcagggcaacgtgttcagctgcagcgtgatgcacgaggccctgcacaatcactacacccagaagagcctgagcctgtcccctggcaagtga

SEQ ID NO: 83 - DNA, 1026 bp, Artificial Sequence
  Synthetic
gacatccagatgacccagagccccagcagcctgagcgcctctgtgggcgatagagtgaccatcacctgcagagccagccaggccatcgacagctacctgcactggtatcagcagaagcctggcaaggcccctaagctgctgatctacagcgccagcaatctggagaccggcgtgcctagcagcttcagcggcagcggctccggcaccgacttcaccctgaccatcagcagcctgctgcctgaggatttcgccacctactactgccagcaggtggtgtggagacctttcaccttcggccagggcaccaaggtggagatcaagcgggtggagcccaagagcagcgataagacccacacctgccccccctgccctgcccccgagctgctgggcggacccagcgtgttcctgttcccccccaagcctaaggacaccctgatgatcagcagaacccccgaggtgacctgcgtggtggtggatgtgagccacgaggaccctgaggtgaagttcaactggtacgtggacggcgtggaggtgcacaatgccaagaccaagcccagggaggagcagtacaacagcacctaccgggtggtgtccgtgctgaccgtgctgcaccaggattggctgaacggcaaggagtacaagtgcaaggtgtccaacaaggccctgcctgcccctatcgagaaaaccatcagcaaggccaagggccagcccagagagccccaggtgtacaccctgccccctagcagagatgagctgaccaagaaccaggtgtccctgacctgcctggtgaagggcttctaccccagcgacatcgccgtggagtgggagagcaacggccagcccgagaacaactacaagaccaccccccctgtgctggacagcgatggcagcttcttcctgtacagcaagctgaccgtggacaagagcagatggcagcagggcaacgtgttcagctgcagcgtgatgcacgaggccctgcacaatcactacacccagaagagcctgagcctgtcccctggcaagtga

SEQ ID NO: 84 - DNA, 1026 bp, Artificial Sequence
  Synthetic
gacatccagatgacccagagccccagcagcctgagcgcctctgtgggcgatagagtgaccatcacctgcagagccagccaggccatcgacagctacctgcactggtatcagcagaagcctggcaaggcccctaagctgctgatctacagcgccagcaatctggagaccggcgtgcctagcctgttcagcggcagcggctccggcaccgacttcaccctgaccatcagcagcctgctgcctgaggatttcgccacctactactgccagcaggtggtgtggagacctttcaccttcggccagggcaccaaggtggagatcaagcgggtggagcccaagagcagcgataagacccacacctgccccccctgccctgcccccgagctgctgggcggacccagcgtgttcctgttcccccccaagcctaaggacaccctgatgatcagcagaacccccgaggtgacctgcgtggtggtggatgtgagccacgaggaccctgaggtgaagttcaactggtacgtggacggcgtggaggtgcacaatgccaagaccaagcccagggaggagcagtacaacagcacctaccgggtggtgtccgtgctgaccgtgctgcaccaggattggctgaacggcaaggagtacaagtgcaaggtgtccaacaaggccctgcctgcccctatcgagaaaaccatcagcaaggccaagggccagcccagagagccccaggtgtacaccctgccccctagcagagatgagctgaccaagaaccaggtgtccctgacctgcctggtgaagggcttctaccccagcgacatcgccgtggagtgggagagcaacggccagcccgagaacaactacaagaccaccccccctgtgctggacagcgatggcagcttcttcctgtacagcaagctgaccgtggacaagagcagatggcagcagggcaacgtgttcagctgcagcgtgatgcacgaggccctgcacaatcactacacccagaagagcctgagcctgtcccctggcaagtga

SEQ ID NO: 85 - DNA, 1026 bp, Artificial Sequence
  Synthetic
gacatccagatgacccagagccccagcagcctgagcgcctctgtgggcgatagagtgaccatcacctgcagagccagccaggccatcgacagctacctgcactggtatcagcagaagcctggcaaggcccctaagctgctgatctacagcgccagcaatctggagaccggcgtgcctagctacttcagcggcagcggctccggcaccgacttcaccctgaccatcagcagcctgctgcctgaggatttcgccacctactactgccagcaggtggtgtggagacctttcaccttcggccagggcaccaaggtggagatcaagcgggtggagcccaagagcagcgataagacccacacctgccccccctgccctgcccccgagctgctgggcggacccagcgtgttcctgttcccccccaagcctaaggacaccctgatgatcagcagaacccccgaggtgacctgcgtggtggtggatgtgagccacgaggaccctgaggtgaagttcaactggtacgtggacggcgtggaggtgcacaatgccaagaccaagcccagggaggagcagtacaacagcacctaccgggtggtgtccgtgctgaccgtgctgcaccaggattggctgaacggcaaggagtacaagtgcaaggtgtccaacaaggccctgcctgcccctatcgagaaaaccatcagcaaggccaagggccagcccagagagccccaggtgtacaccctgccccctagcagagatgagctgaccaagaaccaggtgtccctgacctgcctggtgaagggcttctaccccagcgacatcgccgtggagtgggagagcaacggccagcccgagaacaactacaagaccaccccccctgtgctggacagcgatggcagcttcttcctgtacagcaagctgaccgtggacaagagcagatggcagcagggcaacgtgttcagctgcagcgtgatgcacgaggccctgcacaatcactacacccagaagagcctgagcctgtcccctggcaagtga

SEQ ID NO: 86 - DNA, 1026 bp, Artificial Sequence
  Synthetic
gacatccagatgacccagagccccagcagcctgagcgcctctgtgggcgatagagtgaccatcacctgcagagccagccaggccatcgacagctacctgcactggtatcagcagaagcctggcaaggcccctaagctgctgatctacagcgccagcaatctggagaccggcgtgcctagcgacttcagcggcagcggctccggcaccgacttcaccctgaccatcagcagcctgctgcctgaggatttcgccacctactactgccagcaggtggtgtggagacctttcaccttcggccagggcaccaaggtggagatcaagcgggtggagcccaagagcagcgataagacccacacctgccccccctgccctgcccccgagctgctgggcggacccagcgtgttcctgttcccccccaagcctaaggacaccctgatgatcagcagaacccccgaggtgacctgcgtggtggtggatgtgagccacgaggaccctgaggtgaagttcaactggtacgtggacggcgtggaggtgcacaatgccaagaccaagcccagggaggagcagtacaacagcacctaccgggtggtgtccgtgctgaccgtgctgcaccaggattggctgaacggcaaggagtacaagtgcaaggtgtccaacaaggccctgcctgcccctatcgagaaaaccatcagcaaggccaagggccagcccagagagccccaggtgtacaccctgccccctagcagagatgagctgaccaagaaccaggtgtccctgacctgcctggtgaagggcttctaccccagcgacatcgccgtggagtgggagagcaacggccagcccgagaacaactacaagaccaccccccctgtgctggacagcgatggcagcttcttcctgtacagcaagctgaccgtggacaagagcagatggcagcagggcaacgtgttcagctgcagcgtgatgcacgaggccctgcacaatcactacacccagaagagcctgagcctgtcccctggcaagtga

SEQ ID NO: 87 - DNA, 1026 bp, Artificial Sequence
  Synthetic
gacatccagatgacccagagccccagcagcctgagcgcctctgtgggcgatagagtgaccatcacctgcagagccagccaggccatcgacagctacctgcactggtatcagcagaagcctggcaaggcccctaagctgctgatctacagcgccagcaatctggagaccggcgtgcctagccagttcagcggcagcggctccggcaccgacttcaccctgaccatcagcagcctgctgcctgaggatttcgccacctactactgccagcaggtggtgtggagacctttcaccttcggccagggcaccaaggtggagatcaagcgggtggagcccaagagcagcgataagacccacacctgccccccctgccctgcccccgagctgctgggcggacccagcgtgttcctgttcccccccaagcctaaggacaccctgatgatcagcagaacccccgaggtgacctgcgtggtggtggatgtgagccacgaggaccctgaggtgaagttcaactggtacgtggacggcgtggaggtgcacaatgccaagaccaagcccagggaggagcagtacaacagcacctaccgggtggtgtccgtgctgaccgtgctgcaccaggattggctgaacggcaaggagtacaagtgcaaggtgtccaacaaggccctgcctgcccctatcgagaaaaccatcagcaaggccaagggccagcccagagagccccaggtgtacaccctgccccctagcagagatgagctgaccaagaaccaggtgtccctgacctgcctggtgaagggcttctaccccagcgacatcgccgtggagtgggagagcaacggccagcccgagaacaactacaagaccaccccccctgtgctggacagcgatggcagcttcttcctgtacagcaagctgaccgtggacaagagcagatggcagcagggcaacgtgttcagctgcagcgtgatgcacgaggccctgcacaatcactacacccagaagagcctgagcctgtcccctggcaagtga

SEQ ID NO: 88 - DNA, 1026 bp, Artificial Sequence
  Synthetic
gacatccagatgacccagagccccagcagcctgagcgcctctgtgggcgatagagtgaccatcacctgcagagccagccaggccatcgacagctacctgcactggtatcagcagaagcctggcaaggcccctaagctgctgatctacagcgccagcaatctggagaccggcgtgcctagccacttcagcggcagcggctccggcaccgacttcaccctgaccatcagcagcctgctgcctgaggatttcgccacctactactgccagcaggtggtgtggagacctttcaccttcggccagggcaccaaggtggagatcaagcgggtggagcccaagagcagcgataagacccacacctgccccccctgccctgcccccgagctgctgggcggacccagcgtgttcctgttcccccccaagcctaaggacaccctgatgatcagcagaacccccgaggtgacctgcgtggtggtggatgtgagccacgaggaccctgaggtgaagttcaactggtacgtggacggcgtggaggtgcacaatgccaagaccaagcccagggaggagcagtacaacagcacctaccgggtggtgtccgtgctgaccgtgctgcaccaggattggctgaacggcaaggagtacaagtgcaaggtgtccaacaaggccctgcctgcccctatcgagaaaaccatcagcaaggccaagggccagcccagagagccccaggtgtacaccctgccccctagcagagatgagctgaccaagaaccaggtgtccctgacctgcctggtgaagggcttctaccccagcgacatcgccgtggagtgggagagcaacggccagcccgagaacaactacaagaccaccccccctgtgctggacagcgatggcagcttcttcctgtacagcaagctgaccgtggacaagagcagatggcagcagggcaacgtgttcagctgcagcgtgatgcacgaggccctgcacaatcactacacccagaagagcctgagcctgtcccctggcaagtga

SEQ ID NO: 89 - DNA, 1026 bp, Artificial Sequence
  Synthetic
gacatccagatgacccagagccccagcagcctgagcgcctctgtgggcgatagagtgaccatcacctgcagagccagccaggccatcgacagctacctgcactggtatcagcagaagcctggcaaggcccctaagctgctgatctacagcgccagcaatctggagaccggcgtgcctagccccttcagcggcagcggctccggcaccgacttcaccctgaccatcagcagcctgctgcctgaggatttcgccacctactactgccagcaggtggtgtggagacctttcaccttcggccagggcaccaaggtggagatcaagcgggtggagcccaagagcagcgataagacccacacctgccccccctgccctgcccccgagctgctgggcggacccagcgtgttcctgttcccccccaagcctaaggacaccctgatgatcagcagaacccccgaggtgacctgcgtggtggtggatgtgagccacgaggaccctgaggtgaagttcaactggtacgtggacggcgtggaggtgcacaatgccaagaccaagcccagggaggagcagtacaacagcacctaccgggtggtgtccgtgctgaccgtgctgcaccaggattggctgaacggcaaggagtacaagtgcaaggtgtccaacaaggccctgcctgcccctatcgagaaaaccatcagcaaggccaagggccagcccagagagccccaggtgtacaccctgccccctagcagagatgagctgaccaagaaccaggtgtccctgacctgcctggtgaagggcttctaccccagcgacatcgccgtggagtgggagagcaacggccagcccgagaacaactacaagaccaccccccctgtgctggacagcgatggcagcttcttcctgtacagcaagctgaccgtggacaagagcagatggcagcagggcaacgtgttcagctgcagcgtgatgcacgaggccctgcacaatcactacacccagaagagcctgagcctgtcccctggcaagtga

SEQ ID NO: 90 - DNA, 1026 bp, Artificial Sequence
  Synthetic
gacatccagatgacccagagccccagcagcctgagcgcctctgtgggcgatagagtgaccatcacctgcagagccagccaggccatcgacagctacctgcactggtatcagcagaagcctggcaaggcccctaagctgctgatctacagcgccagcaatctggagaccggcgtgcctagcagattcagcggcagcggctccggcaccgacttcaccctgaccatcagcagcctggtgcctgaggatttcgccacctactactgccagcaggtggtgtggagacctttcaccttcggccagggcaccaaggtggagatcaagcgggtggagcccaagagcagcgataagacccacacctgccccccctgccctgcccccgagctgctgggcggacccagcgtgttcctgttcccccccaagcctaaggacaccctgatgatcagcagaacccccgaggtgacctgcgtggtggtggatgtgagccacgaggaccctgaggtgaagttcaactggtacgtggacggcgtggaggtgcacaatgccaagaccaagcccagggaggagcagtacaacagcacctaccgggtggtgtccgtgctgaccgtgctgcaccaggattggctgaacggcaaggagtacaagtgcaaggtgtccaacaaggccctgcctgcccctatcgagaaaaccatcagcaaggccaagggccagcccagagagccccaggtgtacaccctgccccctagcagagatgagctgaccaagaaccaggtgtccctgacctgcctggtgaagggcttctaccccagcgacatcgccgtggagtgggagagcaacggccagcccgagaacaactacaagaccaccccccctgtgctggacagcgatggcagcttcttcctgtacagcaagctgaccgtggacaagagcagatggcagcagggcaacgtgttcagctgcagcgtgatgcacgaggccctgcacaatcactacacccagaagagcctgagcctgtcccctggcaagtga

SEQ ID NO: 91 - DNA, 1026 bp, Artificial Sequence
  Synthetic
gacatccagatgacccagagccccagcagcctgagcgcctctgtgggcgatagagtgaccatcacctgcagagccagccaggccatcgacagctacctgcactggtatcagcagaagcctggcaaggcccctaagctgctgatctacagcgccagcaatctggagaccggcgtgcctagcagattcagcggcagcggctccggcaccgacttcaccctgaccatcagcagcctgccccctgaggatttcgccacctactactgccagcaggtggtgtggagacctttcaccttcggccagggcaccaaggtggagatcaagcgggtggagcccaagagcagcgataagacccacacctgccccccctgccctgcccccgagctgctgggcggacccagcgtgttcctgttcccccccaagcctaaggacaccctgatgatcagcagaacccccgaggtgacctgcgtggtggtggatgtgagccacgaggaccctgaggtgaagttcaactggtacgtggacggcgtggaggtgcacaatgccaagaccaagcccagggaggagcagtacaacagcacctaccgggtggtgtccgtgctgaccgtgctgcaccaggattggctgaacggcaaggagtacaagtgcaaggtgtccaacaaggccctgcctgcccctatcgagaaaaccatcagcaaggccaagggccagcccagagagccccaggtgtacaccctgccccctagcagagatgagctgaccaagaaccaggtgtccctgacctgcctggtgaagggcttctaccccagcgacatcgccgtggagtgggagagcaacggccagcccgagaacaactacaagaccaccccccctgtgctggacagcgatggcagcttcttcctgtacagcaagctgaccgtggacaagagcagatggcagcagggcaacgtgttcagctgcagcgtgatgcacgaggccctgcacaatcactacacccagaagagcctgagcctgtcccctggcaagtga

SEQ ID NO: 92 - DNA, 1026 bp, Artificial Sequence
  Synthetic
gacatccagatgacccagagccccagcagcctgagcgcctctgtgggcgatagagtgaccatcacctgcagagccagccaggccatcgacagctacctgcactggtatcagcagaagcctggcaaggcccctaagctgctgatctacagcgccagcaatctggagaccggcgtgcctagcagattcagcggcagcggctccggcaccgacttcaccctgaccatcagcagcctggcccctgaggatttcgccacctactactgccagcaggtggtgtggagacctttcaccttcggccagggcaccaaggtggagatcaagcgggtggagcccaagagcagcgataagacccacacctgccccccctgccctgcccccgagctgctgggcggacccagcgtgttcctgttcccccccaagcctaaggacaccctgatgatcagcagaacccccgaggtgacctgcgtggtggtggatgtgagccacgaggaccctgaggtgaagttcaactggtacgtggacggcgtggaggtgcacaatgccaagaccaagcccagggaggagcagtacaacagcacctaccgggtggtgtccgtgctgaccgtgctgcaccaggattggctgaacggcaaggagtacaagtgcaaggtgtccaacaaggccctgcctgcccctatcgagaaaaccatcagcaaggccaagggccagcccagagagccccaggtgtacaccctgccccctagcagagatgagctgaccaagaaccaggtgtccctgacctgcctggtgaagggcttctaccccagcgacatcgccgtggagtgggagagcaacggccagcccgagaacaactacaagaccaccccccctgtgctggacagcgatggcagcttcttcctgtacagcaagctgaccgtggacaagagcagatggcagcagggcaacgtgttcagctgcagcgtgatgcacgaggccctgcacaatcactacacccagaagagcctgagcctgtcccctggcaagtga

SEQ ID NO: 93 - DNA, 1026 bp, Artificial Sequence
  Synthetic
gacatccagatgacccagagccccagcagcctgagcgcctctgtgggcgatagagtgaccatcacctgcagagccagccaggccatcgacagctacctgcactggtatcagcagaagcctggcaaggcccctaagctgctgatctacagcgccagcaatctggagaccggcgtgcctagcagattcagcggcagcggctccggcaccgacttcaccctgaccatcagcagcctgggccctgaggatttcgccacctactactgccagcaggtggtgtggagacctttcaccttcggccagggcaccaaggtggagatcaagcgggtggagcccaagagcagcgataagacccacacctgccccccctgccctgcccccgagctgctgggcggacccagcgtgttcctgttcccccccaagcctaaggacaccctgatgatcagcagaacccccgaggtgacctgcgtggtggtggatgtgagccacgaggaccctgaggtgaagttcaactggtacgtggacggcgtggaggtgcacaatgccaagaccaagcccagggaggagcagtacaacagcacctaccgggtggtgtccgtgctgaccgtgctgcaccaggattggctgaacggcaaggagtacaagtgcaaggtgtccaacaaggccctgcctgcccctatcgagaaaaccatcagcaaggccaagggccagcccagagagccccaggtgtacaccctgccccctagcagagatgagctgaccaagaaccaggtgtccctgacctgcctggtgaagggcttctaccccagcgacatcgccgtggagtgggagagcaacggccagcccgagaacaactacaagaccaccccccctgtgctggacagcgatggcagcttcttcctgtacagcaagctgaccgtggacaagagcagatggcagcagggcaacgtgttcagctgcagcgtgatgcacgaggccctgcacaatcactacacccagaagagcctgagcctgtcccctggcaagtga

SEQ ID NO: 94 - DNA, 1026 bp, Artificial Sequence
  Synthetic
gacatccagatgacccagagccccagcagcctgagcgcctctgtgggcgatagagtgaccatcacctgcagagccagccaggccatcgacagctacctgcactggtatcagcagaagcctggcaaggcccctaagctgctgatctacagcgccagcaatctggagaccggcgtgcctagcagattcagcggcagcggctccggcaccgacttcaccctgaccatcagcagcctgagccctgaggatttcgccacctactactgccagcaggtggtgtggagacctttcaccttcggccagggcaccaaggtggagatcaagcgggtggagcccaagagcagcgataagacccacacctgccccccctgccctgcccccgagctgctgggcggacccagcgtgttcctgttcccccccaagcctaaggacaccctgatgatcagcagaacccccgaggtgacctgcgtggtggtggatgtgagccacgaggaccctgaggtgaagttcaactggtacgtggacggcgtggaggtgcacaatgccaagaccaagcccagggaggagcagtacaacagcacctaccgggtggtgtccgtgctgaccgtgctgcaccaggattggctgaacggcaaggagtacaagtgcaaggtgtccaacaaggccctgcctgcccctatcgagaaaaccatcagcaaggccaagggccagcccagagagccccaggtgtacaccctgccccctagcagagatgagctgaccaagaaccaggtgtccctgacctgcctggtgaagggcttctaccccagcgacatcgccgtggagtgggagagcaacggccagcccgagaacaactacaagaccaccccccctgtgctggacagcgatggcagcttcttcctgtacagcaagctgaccgtggacaagagcagatggcagcagggcaacgtgttcagctgcagcgtgatgcacgaggccctgcacaatcactacacccagaagagcctgagcctgtcccctggcaagtga

SEQ ID NO: 95 - DNA, 1026 bp, Artificial Sequence
  Synthetic
gacatccagatgacccagagccccagcagcctgagcgcctctgtgggcgatagagtgaccatcacctgcagagccagccaggccatcgacagctacctgcactggtatcagcagaagcctggcaaggcccctaagctgctgatctacagcgccagcaatctggagaccggcgtgcctagcagattcagcggcagcggctccggcaccgacttcaccctgaccatcagcagcctgtaccctgaggatttcgccacctactactgccagcaggtggtgtggagacctttcaccttcggccagggcaccaaggtggagatcaagcgggtggagcccaagagcagcgataagacccacacctgccccccctgccctgcccccgagctgctgggcggacccagcgtgttcctgttcccccccaagcctaaggacaccctgatgatcagcagaacccccgaggtgacctgcgtggtggtggatgtgagccacgaggaccctgaggtgaagttcaactggtacgtggacggcgtggaggtgcacaatgccaagaccaagcccagggaggagcagtacaacagcacctaccgggtggtgtccgtgctgaccgtgctgcaccaggattggctgaacggcaaggagtacaagtgcaaggtgtccaacaaggccctgcctgcccctatcgagaaaaccatcagcaaggccaagggccagcccagagagccccaggtgtacaccctgccccctagcagagatgagctgaccaagaaccaggtgtccctgacctgcctggtgaagggcttctaccccagcgacatcgccgtggagtgggagagcaacggccagcccgagaacaactacaagaccaccccccctgtgctggacagcgatggcagcttcttcctgtacagcaagctgaccgtggacaagagcagatggcagcagggcaacgtgttcagctgcagcgtgatgcacgaggccctgcacaatcactacacccagaagagcctgagcctgtcccctggcaagtga

SEQ ID NO: 96 - DNA, 1026 bp, Artificial Sequence
  Synthetic
gacatccagatgacccagagccccagcagcctgagcgcctctgtgggcgatagagtgaccatcacctgcagagccagccaggccatcgacagctacctgcactggtatcagcagaagcctggcaaggcccctaagctgctgatctacagcgccagcaatctggagaccggcgtgcctagcagattcagcggcagcggctccggcaccgacttcaccctgaccatcagcagcctggaccctgaggatttcgccacctactactgccagcaggtggtgtggagacctttcaccttcggccagggcaccaaggtggagatcaagcgggtggagcccaagagcagcgataagacccacacctgccccccctgccctgcccccgagctgctgggcggacccagcgtgttcctgttcccccccaagcctaaggacaccctgatgatcagcagaacccccgaggtgacctgcgtggtggtggatgtgagccacgaggaccctgaggtgaagttcaactggtacgtggacggcgtggaggtgcacaatgccaagaccaagcccagggaggagcagtacaacagcacctaccgggtggtgtccgtgctgaccgtgctgcaccaggattggctgaacggcaaggagtacaagtgcaaggtgtccaacaaggccctgcctgcccctatcgagaaaaccatcagcaaggccaagggccagcccagagagccccaggtgtacaccctgccccctagcagagatgagctgaccaagaaccaggtgtccctgacctgcctggtgaagggcttctaccccagcgacatcgccgtggagtgggagagcaacggccagcccgagaacaactacaagaccaccccccctgtgctggacagcgatggcagcttcttcctgtacagcaagctgaccgtggacaagagcagatggcagcagggcaacgtgttcagctgcagcgtgatgcacgaggccctgcacaatcactacacccagaagagcctgagcctgtcccctggcaagtga

SEQ ID NO: 97 - DNA, 1026 bp, Artificial Sequence
  Synthetic
gacatccagatgacccagagccccagcagcctgagcgcctctgtgggcgatagagtgaccatcacctgcagagccagccaggccatcgacagctacctgcactggtatcagcagaagcctggcaaggcccctaagctgctgatctacagcgccagcaatctggagaccggcgtgcctagcagattcagcggcagcggctccggcaccgacttcaccctgaccatcagcagcctgaagcctgaggatttcgccacctactactgccagcaggtggtgtggagacctttcaccttcggccagggcaccaaggtggagatcaagcgggtggagcccaagagcagcgataagacccacacctgccccccctgccctgcccccgagctgctgggcggacccagcgtgttcctgttcccccccaagcctaaggacaccctgatgatcagcagaacccccgaggtgacctgcgtggtggtggatgtgagccacgaggaccctgaggtgaagttcaactggtacgtggacggcgtggaggtgcacaatgccaagaccaagcccagggaggagcagtacaacagcacctaccgggtggtgtccgtgctgaccgtgctgcaccaggattggctgaacggcaaggagtacaagtgcaaggtgtccaacaaggccctgcctgcccctatcgagaaaaccatcagcaaggccaagggccagcccagagagccccaggtgtacaccctgccccctagcagagatgagctgaccaagaaccaggtgtccctgacctgcctggtgaagggcttctaccccagcgacatcgccgtggagtgggagagcaacggccagcccgagaacaactacaagaccaccccccctgtgctggacagcgatggcagcttcttcctgtacagcaagctgaccgtggacaagagcagatggcagcagggcaacgtgttcagctgcagcgtgatgcacgaggccctgcacaatcactacacccagaagagcctgagcctgtcccctggcaagtga

SEQ ID NO: 98 - DNA, 1026 bp, Artificial Sequence
  Synthetic
gacatccagatgacccagagccccagcagcctgagcgcctctgtgggcgatagagtgaccatcacctgcagagccagccaggccatcgacagctacctgcactggtatcagcagaagcctggcaaggcccctaagctgctgatctacagcgccagcaatctggagaccggcgtgcctagcagattcagcggcagcggctccggcaccgacttcaccctgaccatcagcagcctgctgcctgaggatcccgccacctactactgccagcaggtggtgtggagacctttcaccttcggccagggcaccaaggtggagatcaagcgggtggagcccaagagcagcgataagacccacacctgccccccctgccctgcccccgagctgctgggcggacccagcgtgttcctgttcccccccaagcctaaggacaccctgatgatcagcagaacccccgaggtgacctgcgtggtggtggatgtgagccacgaggaccctgaggtgaagttcaactggtacgtggacggcgtggaggtgcacaatgccaagaccaagcccagggaggagcagtacaacagcacctaccgggtggtgtccgtgctgaccgtgctgcaccaggattggctgaacggcaaggagtacaagtgcaaggtgtccaacaaggccctgcctgcccctatcgagaaaaccatcagcaaggccaagggccagcccagagagccccaggtgtacaccctgccccctagcagagatgagctgaccaagaaccaggtgtccctgacctgcctggtgaagggcttctaccccagcgacatcgccgtggagtgggagagcaacggccagcccgagaacaactacaagaccaccccccctgtgctggacagcgatggcagcttcttcctgtacagcaagctgaccgtggacaagagcagatggcagcagggcaacgtgttcagctgcagcgtgatgcacgaggccctgcacaatcactacacccagaagagcctgagcctgtcccctggcaagtga

SEQ ID NO: 99 - DNA, 1026 bp, Artificial Sequence
  Synthetic
gacatccagatgacccagagccccagcagcctgagcgcctctgtgggcgatagagtgaccatcacctgcagagccagccaggccatcgacagctacctgcactggtatcagcagaagcctggcaaggcccctaagctgctgatctacagcgccagcaatctggagaccggcgtgcctagcagattcagcggcagcggctccggcaccgacttcaccctgaccatcagcagcctgcaccctgaggatttcgccacctactactgccagcaggtggtgtggagacctttcaccttcggccagggcaccaaggtggagatcaagcgggtggagcccaagagcagcgataagacccacacctgccccccctgccctgcccccgagctgctgggcggacccagcgtgttcctgttcccccccaagcctaaggacaccctgatgatcagcagaacccccgaggtgacctgcgtggtggtggatgtgagccacgaggaccctgaggtgaagttcaactggtacgtggacggcgtggaggtgcacaatgccaagaccaagcccagggaggagcagtacaacagcacctaccgggtggtgtccgtgctgaccgtgctgcaccaggattggctgaacggcaaggagtacaagtgcaaggtgtccaacaaggccctgcctgcccctatcgagaaaaccatcagcaaggccaagggccagcccagagagccccaggtgtacaccctgccccctagcagagatgagctgaccaagaaccaggtgtccctgacctgcctggtgaagggcttctaccccagcgacatcgccgtggagtgggagagcaacggccagcccgagaacaactacaagaccaccccccctgtgctggacagcgatggcagcttcttcctgtacagcaagctgaccgtggacaagagcagatggcagcagggcaacgtgttcagctgcagcgtgatgcacgaggccctgcacaatcactacacccagaagagcctgagcctgtcccctggcaagtga

SEQ ID NO: 100 - DNA, 1026 bp, Artificial Sequence
  Synthetic
gacatccagatgacccagagccccagcagcctgagcgcctctgtgggcgatagagtgaccatcacctgcagagccagccaggccatcgacagctacctgcactggtatcagcagaagcctggcaaggcccctaagctgctgatctacagcgccagcaatctggagaccggcgtgcctagcagattcagcggcagcggctccggcaccgacttcaccctgaccatcagcagcctgctgcctgaggatgccgccacctactactgccagcaggtggtgtggagacctttcaccttcggccagggcaccaaggtggagatcaagcgggtggagcccaagagcagcgataagacccacacctgccccccctgccctgcccccgagctgctgggcggacccagcgtgttcctgttcccccccaagcctaaggacaccctgatgatcagcagaacccccgaggtgacctgcgtggtggtggatgtgagccacgaggaccctgaggtgaagttcaactggtacgtggacggcgtggaggtgcacaatgccaagaccaagcccagggaggagcagtacaacagcacctaccgggtggtgtccgtgctgaccgtgctgcaccaggattggctgaacggcaaggagtacaagtgcaaggtgtccaacaaggccctgcctgcccctatcgagaaaaccatcagcaaggccaagggccagcccagagagccccaggtgtacaccctgccccctagcagagatgagctgaccaagaaccaggtgtccctgacctgcctggtgaagggcttctaccccagcgacatcgccgtggagtgggagagcaacggccagcccgagaacaactacaagaccaccccccctgtgctggacagcgatggcagcttcttcctgtacagcaagctgaccgtggacaagagcagatggcagcagggcaacgtgttcagctgcagcgtgatgcacgaggccctgcacaatcactacacccagaagagcctgagcctgtcccctggcaagtga

SEQ ID NO: 101 - DNA, 1026 bp, Artificial Sequence
  Synthetic
gacatccagatgacccagagccccagcagcctgagcgcctctgtgggcgatagagtgaccatcacctgcagagccagccaggccatcgacagctacctgcactggtatcagcagaagcctggcaaggcccctaagctgctgatctacagcgccagcaatctggagaccggcgtgcctagcagattcagcggcagcggctccggcaccgacttcaccctgaccatcagcagcctgctgcctgaggatggcgccacctactactgccagcaggtggtgtggagacctttcaccttcggccagggcaccaaggtggagatcaagcgggtggagcccaagagcagcgataagacccacacctgccccccctgccctgcccccgagctgctgggcggacccagcgtgttcctgttcccccccaagcctaaggacaccctgatgatcagcagaacccccgaggtgacctgcgtggtggtggatgtgagccacgaggaccctgaggtgaagttcaactggtacgtggacggcgtggaggtgcacaatgccaagaccaagcccagggaggagcagtacaacagcacctaccgggtggtgtccgtgctgaccgtgctgcaccaggattggctgaacggcaaggagtacaagtgcaaggtgtccaacaaggccctgcctgcccctatcgagaaaaccatcagcaaggccaagggccagcccagagagccccaggtgtacaccctgccccctagcagagatgagctgaccaagaaccaggtgtccctgacctgcctggtgaagggcttctaccccagcgacatcgccgtggagtgggagagcaacggccagcccgagaacaactacaagaccaccccccctgtgctggacagcgatggcagcttcttcctgtacagcaagctgaccgtggacaagagcagatggcagcagggcaacgtgttcagctgcagcgtgatgcacgaggccctgcacaatcactacacccagaagagcctgagcctgtcccctggcaagtga

SEQ ID NO: 102 - DNA, 1026 bp, Artificial Sequence
  Synthetic
gacatccagatgacccagagccccagcagcctgagcgcctctgtgggcgatagagtgaccatcacctgcagagccagccaggccatcgacagctacctgcactggtatcagcagaagcctggcaaggcccctaagctgctgatctacagcgccagcaatctggagaccggcgtgcctagcagattcagcggcagcggctccggcaccgacttcaccctgaccatcagcagcctgctgcctgaggatagcgccacctactactgccagcaggtggtgtggagacctttcaccttcggccagggcaccaaggtggagatcaagcgggtggagcccaagagcagcgataagacccacacctgccccccctgccctgcccccgagctgctgggcggacccagcgtgttcctgttcccccccaagcctaaggacaccctgatgatcagcagaacccccgaggtgacctgcgtggtggtggatgtgagccacgaggaccctgaggtgaagttcaactggtacgtggacggcgtggaggtgcacaatgccaagaccaagcccagggaggagcagtacaacagcacctaccgggtggtgtccgtgctgaccgtgctgcaccaggattggctgaacggcaaggagtacaagtgcaaggtgtccaacaaggccctgcctgcccctatcgagaaaaccatcagcaaggccaagggccagcccagagagccccaggtgtacaccctgccccctagcagagatgagctgaccaagaaccaggtgtccctgacctgcctggtgaagggcttctaccccagcgacatcgccgtggagtgggagagcaacggccagcccgagaacaactacaagaccaccccccctgtgctggacagcgatggcagcttcttcctgtacagcaagctgaccgtggacaagagcagatggcagcagggcaacgtgttcagctgcagcgtgatgcacgaggccctgcacaatcactacacccagaagagcctgagcctgtcccctggcaagtga

SEQ ID NO: 103 - DNA, 1026 bp, Artificial Sequence
  Synthetic
gacatccagatgacccagagccccagcagcctgagcgcctctgtgggcgatagagtgaccatcacctgcagagccagccaggccatcgacagctacctgcactggtatcagcagaagcctggcaaggcccctaagctgctgatctacagcgccagcaatctggagaccggcgtgcctagcagattcagcggcagcggctccggcaccgacttcaccctgaccatcagcagcctgctgcctgaggatctggccacctactactgccagcaggtggtgtggagacctttcaccttcggccagggcaccaaggtggagatcaagcgggtggagcccaagagcagcgataagacccacacctgccccccctgccctgcccccgagctgctgggcggacccagcgtgttcctgttcccccccaagcctaaggacaccctgatgatcagcagaacccccgaggtgacctgcgtggtggtggatgtgagccacgaggaccctgaggtgaagttcaactggtacgtggacggcgtggaggtgcacaatgccaagaccaagcccagggaggagcagtacaacagcacctaccgggtggtgtccgtgctgaccgtgctgcaccaggattggctgaacggcaaggagtacaagtgcaaggtgtccaacaaggccctgcctgcccctatcgagaaaaccatcagcaaggccaagggccagcccagagagccccaggtgtacaccctgccccctagcagagatgagctgaccaagaaccaggtgtccctgacctgcctggtgaagggcttctaccccagcgacatcgccgtggagtgggagagcaacggccagcccgagaacaactacaagaccaccccccctgtgctggacagcgatggcagcttcttcctgtacagcaagctgaccgtggacaagagcagatggcagcagggcaacgtgttcagctgcagcgtgatgcacgaggccctgcacaatcactacacccagaagagcctgagcctgtcccctggcaagtga

SEQ ID NO: 104 - DNA, 1026 bp, Artificial Sequence
  Synthetic
gacatccagatgacccagagccccagcagcctgagcgcctctgtgggcgatagagtgaccatcacctgcagagccagccaggccatcgacagctacctgcactggtatcagcagaagcctggcaaggcccctaagctgctgatctacagcgccagcaatctggagaccggcgtgcctagcagattcagcggcagcggctccggcaccgacttcaccctgaccatcagcagcctgctgcctgaggattacgccacctactactgccagcaggtggtgtggagacctttcaccttcggccagggcaccaaggtggagatcaagcgggtggagcccaagagcagcgataagacccacacctgccccccctgccctgcccccgagctgctgggcggacccagcgtgttcctgttcccccccaagcctaaggacaccctgatgatcagcagaacccccgaggtgacctgcgtggtggtggatgtgagccacgaggaccctgaggtgaagttcaactggtacgtggacggcgtggaggtgcacaatgccaagaccaagcccagggaggagcagtacaacagcacctaccgggtggtgtccgtgctgaccgtgctgcaccaggattggctgaacggcaaggagtacaagtgcaaggtgtccaacaaggccctgcctgcccctatcgagaaaaccatcagcaaggccaagggccagcccagagagccccaggtgtacaccctgccccctagcagagatgagctgaccaagaaccaggtgtccctgacctgcctggtgaagggcttctaccccagcgacatcgccgtggagtgggagagcaacggccagcccgagaacaactacaagaccaccccccctgtgctggacagcgatggcagcttcttcctgtacagcaagctgaccgtggacaagagcagatggcagcagggcaacgtgttcagctgcagcgtgatgcacgaggccctgcacaatcactacacccagaagagcctgagcctgtcccctggcaagtga

SEQ ID NO: 105 - DNA, 1026 bp, Artificial Sequence
  Synthetic
gacatccagatgacccagagccccagcagcctgagcgcctctgtgggcgatagagtgaccatcacctgcagagccagccaggccatcgacagctacctgcactggtatcagcagaagcctggcaaggcccctaagctgctgatctacagcgccagcaatctggagaccggcgtgcctagcagattcagcggcagcggctccggcaccgacttcaccctgaccatcagcagcctgctgcctgaggatgacgccacctactactgccagcaggtggtgtggagacctttcaccttcggccagggcaccaaggtggagatcaagcgggtggagcccaagagcagcgataagacccacacctgccccccctgccctgcccccgagctgctgggcggacccagcgtgttcctgttcccccccaagcctaaggacaccctgatgatcagcagaacccccgaggtgacctgcgtggtggtggatgtgagccacgaggaccctgaggtgaagttcaactggtacgtggacggcgtggaggtgcacaatgccaagaccaagcccagggaggagcagtacaacagcacctaccgggtggtgtccgtgctgaccgtgctgcaccaggattggctgaacggcaaggagtacaagtgcaaggtgtccaacaaggccctgcctgcccctatcgagaaaaccatcagcaaggccaagggccagcccagagagccccaggtgtacaccctgccccctagcagagatgagctgaccaagaaccaggtgtccctgacctgcctggtgaagggcttctaccccagcgacatcgccgtggagtgggagagcaacggccagcccgagaacaactacaagaccaccccccctgtgctggacagcgatggcagcttcttcctgtacagcaagctgaccgtggacaagagcagatggcagcagggcaacgtgttcagctgcagcgtgatgcacgaggccctgcacaatcactacacccagaagagcctgagcctgtcccctggcaagtga

SEQ ID NO: 106 - DNA, 1026 bp, Artificial Sequence
  Synthetic
gacatccagatgacccagagccccagcagcctgagcgcctctgtgggcgatagagtgaccatcacctgcagagccagccaggccatcgacagctacctgcactggtatcagcagaagcctggcaaggcccctaagctgctgatctacagcgccagcaatctggagaccggcgtgcctagcagattcagcggcagcggctccggcaccgacttcaccctgaccatcagcagcctgctgcctgaggatcaggccacctactactgccagcaggtggtgtggagacctttcaccttcggccagggcaccaaggtggagatcaagcgggtggagcccaagagcagcgataagacccacacctgccccccctgccctgcccccgagctgctgggcggacccagcgtgttcctgttcccccccaagcctaaggacaccctgatgatcagcagaacccccgaggtgacctgcgtggtggtggatgtgagccacgaggaccctgaggtgaagttcaactggtacgtggacggcgtggaggtgcacaatgccaagaccaagcccagggaggagcagtacaacagcacctaccgggtggtgtccgtgctgaccgtgctgcaccaggattggctgaacggcaaggagtacaagtgcaaggtgtccaacaaggccctgcctgcccctatcgagaaaaccatcagcaaggccaagggccagcccagagagccccaggtgtacaccctgccccctagcagagatgagctgaccaagaaccaggtgtccctgacctgcctggtgaagggcttctaccccagcgacatcgccgtggagtgggagagcaacggccagcccgagaacaactacaagaccaccccccctgtgctggacagcgatggcagcttcttcctgtacagcaagctgaccgtggacaagagcagatggcagcagggcaacgtgttcagctgcagcgtgatgcacgaggccctgcacaatcactacacccagaagagcctgagcctgtcccctggcaagtga

SEQ ID NO: 107 - DNA, 1026 bp, Artificial Sequence
  Synthetic
gacatccagatgacccagagccccagcagcctgagcgcctctgtgggcgatagagtgaccatcacctgcagagccagccaggccatcgacagctacctgcactggtatcagcagaagcctggcaaggcccctaagctgctgatctacagcgccagcaatctggagaccggcgtgcctagcagattcagcggcagcggctccggcaccgacttcaccctgaccatcagcagcctgctgcctgaggatcacgccacctactactgccagcaggtggtgtggagacctttcaccttcggccagggcaccaaggtggagatcaagcgggtggagcccaagagcagcgataagacccacacctgccccccctgccctgcccccgagctgctgggcggacccagcgtgttcctgttcccccccaagcctaaggacaccctgatgatcagcagaacccccgaggtgacctgcgtggtggtggatgtgagccacgaggaccctgaggtgaagttcaactggtacgtggacggcgtggaggtgcacaatgccaagaccaagcccagggaggagcagtacaacagcacctaccgggtggtgtccgtgctgaccgtgctgcaccaggattggctgaacggcaaggagtacaagtgcaaggtgtccaacaaggccctgcctgcccctatcgagaaaaccatcagcaaggccaagggccagcccagagagccccaggtgtacaccctgccccctagcagagatgagctgaccaagaaccaggtgtccctgacctgcctggtgaagggcttctaccccagcgacatcgccgtggagtgggagagcaacggccagcccgagaacaactacaagaccaccccccctgtgctggacagcgatggcagcttcttcctgtacagcaagctgaccgtggacaagagcagatggcagcagggcaacgtgttcagctgcagcgtgatgcacgaggccctgcacaatcactacacccagaagagcctgagcctgtcccctggcaagtga

SEQ ID NO: 108 - DNA, 1026 bp, Artificial Sequence
  Synthetic
gccatccagatgacccagagccccagcagcctgagcgcctctgtgggcgatagagtgaccatcacctgcagagccagccaggccatcgacagctacctgcactggtatcagcagaagcctggcaaggcccctaagctgctgatctacagcgccagcaatctggagaccggcgtgcctagcagattcagcggcagcggctccggcaccgacttcaccctgaccatcagcagcctgctgcctgaggatttcgccacctactactgccagcaggtggtgtggagacctttcaccttcggccagggcaccaaggtggagatcaagcgggtggagcccaagagcagcgataagacccacacctgccccccctgccctgcccccgagctgctgggcggacccagcgtgttcctgttcccccccaagcctaaggacaccctgatgatcagcagaacccccgaggtgacctgcgtggtggtggatgtgagccacgaggaccctgaggtgaagttcaactggtacgtggacggcgtggaggtgcacaatgccaagaccaagcccagggaggagcagtacaacagcacctaccgggtggtgtccgtgctgaccgtgctgcaccaggattggctgaacggcaaggagtacaagtgcaaggtgtccaacaaggccctgcctgcccctatcgagaaaaccatcagcaaggccaagggccagcccagagagccccaggtgtacaccctgccccctagcagagatgagctgaccaagaaccaggtgtccctgacctgcctggtgaagggcttctaccccagcgacatcgccgtggagtgggagagcaacggccagcccgagaacaactacaagaccaccccccctgtgctggacagcgatggcagcttcttcctgtacagcaagctgaccgtggacaagagcagatggcagcagggcaacgtgttcagctgcagcgtgatgcacgaggccctgcacaatcactacacccagaagagcctgagcctgtcccctggcaagtga

SEQ ID NO: 109 - DNA, 1026 bp, Artificial Sequence
  Synthetic
gacgcccagatgacccagagccccagcagcctgagcgcctctgtgggcgatagagtgaccatcacctgcagagccagccaggccatcgacagctacctgcactggtatcagcagaagcctggcaaggcccctaagctgctgatctacagcgccagcaatctggagaccggcgtgcctagcagattcagcggcagcggctccggcaccgacttcaccctgaccatcagcagcctgctgcctgaggatttcgccacctactactgccagcaggtggtgtggagacctttcaccttcggccagggcaccaaggtggagatcaagcgggtggagcccaagagcagcgataagacccacacctgccccccctgccctgcccccgagctgctgggcggacccagcgtgttcctgttcccccccaagcctaaggacaccctgatgatcagcagaacccccgaggtgacctgcgtggtggtggatgtgagccacgaggaccctgaggtgaagttcaactggtacgtggacggcgtggaggtgcacaatgccaagaccaagcccagggaggagcagtacaacagcacctaccgggtggtgtccgtgctgaccgtgctgcaccaggattggctgaacggcaaggagtacaagtgcaaggtgtccaacaaggccctgcctgcccctatcgagaaaaccatcagcaaggccaagggccagcccagagagccccaggtgtacaccctgccccctagcagagatgagctgaccaagaaccaggtgtccctgacctgcctggtgaagggcttctaccccagcgacatcgccgtggagtgggagagcaacggccagcccgagaacaactacaagaccaccccccctgtgctggacagcgatggcagcttcttcctgtacagcaagctgaccgtggacaagagcagatggcagcagggcaacgtgttcagctgcagcgtgatgcacgaggccctgcacaatcactacacccagaagagcctgagcctgtcccctggcaagtga

SEQ ID NO: 110 - DNA, 1026 bp, Artificial Sequence
  Synthetic
gactaccagatgacccagagccccagcagcctgagcgcctctgtgggcgatagagtgaccatcacctgcagagccagccaggccatcgacagctacctgcactggtatcagcagaagcctggcaaggcccctaagctgctgatctacagcgccagcaatctggagaccggcgtgcctagcagattcagcggcagcggctccggcaccgacttcaccctgaccatcagcagcctgctgcctgaggatttcgccacctactactgccagcaggtggtgtggagacctttcaccttcggccagggcaccaaggtggagatcaagcgggtggagcccaagagcagcgataagacccacacctgccccccctgccctgcccccgagctgctgggcggacccagcgtgttcctgttcccccccaagcctaaggacaccctgatgatcagcagaacccccgaggtgacctgcgtggtggtggatgtgagccacgaggaccctgaggtgaagttcaactggtacgtggacggcgtggaggtgcacaatgccaagaccaagcccagggaggagcagtacaacagcacctaccgggtggtgtccgtgctgaccgtgctgcaccaggattggctgaacggcaaggagtacaagtgcaaggtgtccaacaaggccctgcctgcccctatcgagaaaaccatcagcaaggccaagggccagcccagagagccccaggtgtacaccctgccccctagcagagatgagctgaccaagaaccaggtgtccctgacctgcctggtgaagggcttctaccccagcgacatcgccgtggagtgggagagcaacggccagcccgagaacaactacaagaccaccccccctgtgctggacagcgatggcagcttcttcctgtacagcaagctgaccgtggacaagagcagatggcagcagggcaacgtgttcagctgcagcgtgatgcacgaggccctgcacaatcactacacccagaagagcctgagcctgtcccctggcaagtga

SEQ ID NO: 111 - DNA, 1026 bp, Artificial Sequence
  Synthetic
gacatcgccatgacccagagccccagcagcctgagcgcctctgtgggcgatagagtgaccatcacctgcagagccagccaggccatcgacagctacctgcactggtatcagcagaagcctggcaaggcccctaagctgctgatctacagcgccagcaatctggagaccggcgtgcctagcagattcagcggcagcggctccggcaccgacttcaccctgaccatcagcagcctgctgcctgaggatttcgccacctactactgccagcaggtggtgtggagacctttcaccttcggccagggcaccaaggtggagatcaagcgggtggagcccaagagcagcgataagacccacacctgccccccctgccctgcccccgagctgctgggcggacccagcgtgttcctgttcccccccaagcctaaggacaccctgatgatcagcagaacccccgaggtgacctgcgtggtggtggatgtgagccacgaggaccctgaggtgaagttcaactggtacgtggacggcgtggaggtgcacaatgccaagaccaagcccagggaggagcagtacaacagcacctaccgggtggtgtccgtgctgaccgtgctgcaccaggattggctgaacggcaaggagtacaagtgcaaggtgtccaacaaggccctgcctgcccctatcgagaaaaccatcagcaaggccaagggccagcccagagagccccaggtgtacaccctgccccctagcagagatgagctgaccaagaaccaggtgtccctgacctgcctggtgaagggcttctaccccagcgacatcgccgtggagtgggagagcaacggccagcccgagaacaactacaagaccaccccccctgtgctggacagcgatggcagcttcttcctgtacagcaagctgaccgtggacaagagcagatggcagcagggcaacgtgttcagctgcagcgtgatgcacgaggccctgcacaatcactacacccagaagagcctgagcctgtcccctggcaagtga

SEQ ID NO: 112 - DNA, 1026 bp, Artificial Sequence
  Synthetic
gacatctacatgacccagagccccagcagcctgagcgcctctgtgggcgatagagtgaccatcacctgcagagccagccaggccatcgacagctacctgcactggtatcagcagaagcctggcaaggcccctaagctgctgatctacagcgccagcaatctggagaccggcgtgcctagcagattcagcggcagcggctccggcaccgacttcaccctgaccatcagcagcctgctgcctgaggatttcgccacctactactgccagcaggtggtgtggagacctttcaccttcggccagggcaccaaggtggagatcaagcgggtggagcccaagagcagcgataagacccacacctgccccccctgccctgcccccgagctgctgggcggacccagcgtgttcctgttcccccccaagcctaaggacaccctgatgatcagcagaacccccgaggtgacctgcgtggtggtggatgtgagccacgaggaccctgaggtgaagttcaactggtacgtggacggcgtggaggtgcacaatgccaagaccaagcccagggaggagcagtacaacagcacctaccgggtggtgtccgtgctgaccgtgctgcaccaggattggctgaacggcaaggagtacaagtgcaaggtgtccaacaaggccctgcctgcccctatcgagaaaaccatcagcaaggccaagggccagcccagagagccccaggtgtacaccctgccccctagcagagatgagctgaccaagaaccaggtgtccctgacctgcctggtgaagggcttctaccccagcgacatcgccgtggagtgggagagcaacggccagcccgagaacaactacaagaccaccccccctgtgctggacagcgatggcagcttcttcctgtacagcaagctgaccgtggacaagagcagatggcagcagggcaacgtgttcagctgcagcgtgatgcacgaggccctgcacaatcactacacccagaagagcctgagcctgtcccctggcaagtga

SEQ ID NO: 113 - DNA, 1026 bp, Artificial Sequence
  Synthetic
gacatccaggccacccagagccccagcagcctgagcgcctctgtgggcgatagagtgaccatcacctgcagagccagccaggccatcgacagctacctgcactggtatcagcagaagcctggcaaggcccctaagctgctgatctacagcgccagcaatctggagaccggcgtgcctagcagattcagcggcagcggctccggcaccgacttcaccctgaccatcagcagcctgctgcctgaggatttcgccacctactactgccagcaggtggtgtggagacctttcaccttcggccagggcaccaaggtggagatcaagcgggtggagcccaagagcagcgataagacccacacctgccccccctgccctgcccccgagctgctgggcggacccagcgtgttcctgttcccccccaagcctaaggacaccctgatgatcagcagaacccccgaggtgacctgcgtggtggtggatgtgagccacgaggaccctgaggtgaagttcaactggtacgtggacggcgtggaggtgcacaatgccaagaccaagcccagggaggagcagtacaacagcacctaccgggtggtgtccgtgctgaccgtgctgcaccaggattggctgaacggcaaggagtacaagtgcaaggtgtccaacaaggccctgcctgcccctatcgagaaaaccatcagcaaggccaagggccagcccagagagccccaggtgtacaccctgccccctagcagagatgagctgaccaagaaccaggtgtccctgacctgcctggtgaagggcttctaccccagcgacatcgccgtggagtgggagagcaacggccagcccgagaacaactacaagaccaccccccctgtgctggacagcgatggcagcttcttcctgtacagcaagctgaccgtggacaagagcagatggcagcagggcaacgtgttcagctgcagcgtgatgcacgaggccctgcacaatcactacacccagaagagcctgagcctgtcccctggcaagtga

SEQ ID NO: 114 - DNA, 1026 bp, Artificial Sequence
  Synthetic
gacatccagctgacccagagccccagcagcctgagcgcctctgtgggcgatagagtgaccatcacctgcagagccagccaggccatcgacagctacctgcactggtatcagcagaagcctggcaaggcccctaagctgctgatctacagcgccagcaatctggagaccggcgtgcctagcagattcagcggcagcggctccggcaccgacttcaccctgaccatcagcagcctgctgcctgaggatttcgccacctactactgccagcaggtggtgtggagacctttcaccttcggccagggcaccaaggtggagatcaagcgggtggagcccaagagcagcgataagacccacacctgccccccctgccctgcccccgagctgctgggcggacccagcgtgttcctgttcccccccaagcctaaggacaccctgatgatcagcagaacccccgaggtgacctgcgtggtggtggatgtgagccacgaggaccctgaggtgaagttcaactggtacgtggacggcgtggaggtgcacaatgccaagaccaagcccagggaggagcagtacaacagcacctaccgggtggtgtccgtgctgaccgtgctgcaccaggattggctgaacggcaaggagtacaagtgcaaggtgtccaacaaggccctgcctgcccctatcgagaaaaccatcagcaaggccaagggccagcccagagagccccaggtgtacaccctgccccctagcagagatgagctgaccaagaaccaggtgtccctgacctgcctggtgaagggcttctaccccagcgacatcgccgtggagtgggagagcaacggccagcccgagaacaactacaagaccaccccccctgtgctggacagcgatggcagcttcttcctgtacagcaagctgaccgtggacaagagcagatggcagcagggcaacgtgttcagctgcagcgtgatgcacgaggccctgcacaatcactacacccagaagagcctgagcctgtcccctggcaagtga

SEQ ID NO: 115 - DNA, 1026 bp, Artificial Sequence
  Synthetic
gacatccagatggcccagagccccagcagcctgagcgcctctgtgggcgatagagtgaccatcacctgcagagccagccaggccatcgacagctacctgcactggtatcagcagaagcctggcaaggcccctaagctgctgatctacagcgccagcaatctggagaccggcgtgcctagcagattcagcggcagcggctccggcaccgacttcaccctgaccatcagcagcctgctgcctgaggatttcgccacctactactgccagcaggtggtgtggagacctttcaccttcggccagggcaccaaggtggagatcaagcgggtggagcccaagagcagcgataagacccacacctgccccccctgccctgcccccgagctgctgggcggacccagcgtgttcctgttcccccccaagcctaaggacaccctgatgatcagcagaacccccgaggtgacctgcgtggtggtggatgtgagccacgaggaccctgaggtgaagttcaactggtacgtggacggcgtggaggtgcacaatgccaagaccaagcccagggaggagcagtacaacagcacctaccgggtggtgtccgtgctgaccgtgctgcaccaggattggctgaacggcaaggagtacaagtgcaaggtgtccaacaaggccctgcctgcccctatcgagaaaaccatcagcaaggccaagggccagcccagagagccccaggtgtacaccctgccccctagcagagatgagctgaccaagaaccaggtgtccctgacctgcctggtgaagggcttctaccccagcgacatcgccgtggagtgggagagcaacggccagcccgagaacaactacaagaccaccccccctgtgctggacagcgatggcagcttcttcctgtacagcaagctgaccgtggacaagagcagatggcagcagggcaacgtgttcagctgcagcgtgatgcacgaggccctgcacaatcactacacccagaagagcctgagcctgtcccctggcaagtga

SEQ ID NO: 116 - DNA, 1026 bp, Artificial Sequence
  Synthetic
gacatccagatgtaccagagccccagcagcctgagcgcctctgtgggcgatagagtgaccatcacctgcagagccagccaggccatcgacagctacctgcactggtatcagcagaagcctggcaaggcccctaagctgctgatctacagcgccagcaatctggagaccggcgtgcctagcagattcagcggcagcggctccggcaccgacttcaccctgaccatcagcagcctgctgcctgaggatttcgccacctactactgccagcaggtggtgtggagacctttcaccttcggccagggcaccaaggtggagatcaagcgggtggagcccaagagcagcgataagacccacacctgccccccctgccctgcccccgagctgctgggcggacccagcgtgttcctgttcccccccaagcctaaggacaccctgatgatcagcagaacccccgaggtgacctgcgtggtggtggatgtgagccacgaggaccctgaggtgaagttcaactggtacgtggacggcgtggaggtgcacaatgccaagaccaagcccagggaggagcagtacaacagcacctaccgggtggtgtccgtgctgaccgtgctgcaccaggattggctgaacggcaaggagtacaagtgcaaggtgtccaacaaggccctgcctgcccctatcgagaaaaccatcagcaaggccaagggccagcccagagagccccaggtgtacaccctgccccctagcagagatgagctgaccaagaaccaggtgtccctgacctgcctggtgaagggcttctaccccagcgacatcgccgtggagtgggagagcaacggccagcccgagaacaactacaagaccaccccccctgtgctggacagcgatggcagcttcttcctgtacagcaagctgaccgtggacaagagcagatggcagcagggcaacgtgttcagctgcagcgtgatgcacgaggccctgcacaatcactacacccagaagagcctgagcctgtcccctggcaagtga

SEQ ID NO: 117 - DNA, 1026 bp, Artificial Sequence
  Synthetic
gacatccagatgaccgccagccccagcagcctgagcgcctctgtgggcgatagagtgaccatcacctgcagagccagccaggccatcgacagctacctgcactggtatcagcagaagcctggcaaggcccctaagctgctgatctacagcgccagcaatctggagaccggcgtgcctagcagattcagcggcagcggctccggcaccgacttcaccctgaccatcagcagcctgctgcctgaggatttcgccacctactactgccagcaggtggtgtggagacctttcaccttcggccagggcaccaaggtggagatcaagcgggtggagcccaagagcagcgataagacccacacctgccccccctgccctgcccccgagctgctgggcggacccagcgtgttcctgttcccccccaagcctaaggacaccctgatgatcagcagaacccccgaggtgacctgcgtggtggtggatgtgagccacgaggaccctgaggtgaagttcaactggtacgtggacggcgtggaggtgcacaatgccaagaccaagcccagggaggagcagtacaacagcacctaccgggtggtgtccgtgctgaccgtgctgcaccaggattggctgaacggcaaggagtacaagtgcaaggtgtccaacaaggccctgcctgcccctatcgagaaaaccatcagcaaggccaagggccagcccagagagccccaggtgtacaccctgccccctagcagagatgagctgaccaagaaccaggtgtccctgacctgcctggtgaagggcttctaccccagcgacatcgccgtggagtgggagagcaacggccagcccgagaacaactacaagaccaccccccctgtgctggacagcgatggcagcttcttcctgtacagcaagctgaccgtggacaagagcagatggcagcagggcaacgtgttcagctgcagcgtgatgcacgaggccctgcacaatcactacacccagaagagcctgagcctgtcccctggcaagtga

SEQ ID NO: 118 - DNA, 1026 bp, Artificial Sequence
  Synthetic
gacatccagatgacctacagccccagcagcctgagcgcctctgtgggcgatagagtgaccatcacctgcagagccagccaggccatcgacagctacctgcactggtatcagcagaagcctggcaaggcccctaagctgctgatctacagcgccagcaatctggagaccggcgtgcctagcagattcagcggcagcggctccggcaccgacttcaccctgaccatcagcagcctgctgcctgaggatttcgccacctactactgccagcaggtggtgtggagacctttcaccttcggccagggcaccaaggtggagatcaagcgggtggagcccaagagcagcgataagacccacacctgccccccctgccctgcccccgagctgctgggcggacccagcgtgttcctgttcccccccaagcctaaggacaccctgatgatcagcagaacccccgaggtgacctgcgtggtggtggatgtgagccacgaggaccctgaggtgaagttcaactggtacgtggacggcgtggaggtgcacaatgccaagaccaagcccagggaggagcagtacaacagcacctaccgggtggtgtccgtgctgaccgtgctgcaccaggattggctgaacggcaaggagtacaagtgcaaggtgtccaacaaggccctgcctgcccctatcgagaaaaccatcagcaaggccaagggccagcccagagagccccaggtgtacaccctgccccctagcagagatgagctgaccaagaaccaggtgtccctgacctgcctggtgaagggcttctaccccagcgacatcgccgtggagtgggagagcaacggccagcccgagaacaactacaagaccaccccccctgtgctggacagcgatggcagcttcttcctgtacagcaagctgaccgtggacaagagcagatggcagcagggcaacgtgttcagctgcagcgtgatgcacgaggccctgcacaatcactacacccagaagagcctgagcctgtcccctggcaagtga

SEQ ID NO: 119 - DNA, 1026 bp, Artificial Sequence
  Synthetic
gacatccagatgacccaggcccccagcagcctgagcgcctctgtgggcgatagagtgaccatcacctgcagagccagccaggccatcgacagctacctgcactggtatcagcagaagcctggcaaggcccctaagctgctgatctacagcgccagcaatctggagaccggcgtgcctagcagattcagcggcagcggctccggcaccgacttcaccctgaccatcagcagcctgctgcctgaggatttcgccacctactactgccagcaggtggtgtggagacctttcaccttcggccagggcaccaaggtggagatcaagcgggtggagcccaagagcagcgataagacccacacctgccccccctgccctgcccccgagctgctgggcggacccagcgtgttcctgttcccccccaagcctaaggacaccctgatgatcagcagaacccccgaggtgacctgcgtggtggtggatgtgagccacgaggaccctgaggtgaagttcaactggtacgtggacggcgtggaggtgcacaatgccaagaccaagcccagggaggagcagtacaacagcacctaccgggtggtgtccgtgctgaccgtgctgcaccaggattggctgaacggcaaggagtacaagtgcaaggtgtccaacaaggccctgcctgcccctatcgagaaaaccatcagcaaggccaagggccagcccagagagccccaggtgtacaccctgccccctagcagagatgagctgaccaagaaccaggtgtccctgacctgcctggtgaagggcttctaccccagcgacatcgccgtggagtgggagagcaacggccagcccgagaacaactacaagaccaccccccctgtgctggacagcgatggcagcttcttcctgtacagcaagctgaccgtggacaagagcagatggcagcagggcaacgtgttcagctgcagcgtgatgcacgaggccctgcacaatcactacacccagaagagcctgagcctgtcccctggcaagtga

SEQ ID NO: 120 - DNA, 1026 bp, Artificial Sequence
  Synthetic
gacatccagatgacccagtaccccagcagcctgagcgcctctgtgggcgatagagtgaccatcacctgcagagccagccaggccatcgacagctacctgcactggtatcagcagaagcctggcaaggcccctaagctgctgatctacagcgccagcaatctggagaccggcgtgcctagcagattcagcggcagcggctccggcaccgacttcaccctgaccatcagcagcctgctgcctgaggatttcgccacctactactgccagcaggtggtgtggagacctttcaccttcggccagggcaccaaggtggagatcaagcgggtggagcccaagagcagcgataagacccacacctgccccccctgccctgcccccgagctgctgggcggacccagcgtgttcctgttcccccccaagcctaaggacaccctgatgatcagcagaacccccgaggtgacctgcgtggtggtggatgtgagccacgaggaccctgaggtgaagttcaactggtacgtggacggcgtggaggtgcacaatgccaagaccaagcccagggaggagcagtacaacagcacctaccgggtggtgtccgtgctgaccgtgctgcaccaggattggctgaacggcaaggagtacaagtgcaaggtgtccaacaaggccctgcctgcccctatcgagaaaaccatcagcaaggccaagggccagcccagagagccccaggtgtacaccctgccccctagcagagatgagctgaccaagaaccaggtgtccctgacctgcctggtgaagggcttctaccccagcgacatcgccgtggagtgggagagcaacggccagcccgagaacaactacaagaccaccccccctgtgctggacagcgatggcagcttcttcctgtacagcaagctgaccgtggacaagagcagatggcagcagggcaacgtgttcagctgcagcgtgatgcacgaggccctgcacaatcactacacccagaagagcctgagcctgtcccctggcaagtga

SEQ ID NO: 121 - DNA, 1026 bp, Artificial Sequence
  Synthetic
gacatccagatgacccagagcgccagcagcctgagcgcctctgtgggcgatagagtgaccatcacctgcagagccagccaggccatcgacagctacctgcactggtatcagcagaagcctggcaaggcccctaagctgctgatctacagcgccagcaatctggagaccggcgtgcctagcagattcagcggcagcggctccggcaccgacttcaccctgaccatcagcagcctgctgcctgaggatttcgccacctactactgccagcaggtggtgtggagacctttcaccttcggccagggcaccaaggtggagatcaagcgggtggagcccaagagcagcgataagacccacacctgccccccctgccctgcccccgagctgctgggcggacccagcgtgttcctgttcccccccaagcctaaggacaccctgatgatcagcagaacccccgaggtgacctgcgtggtggtggatgtgagccacgaggaccctgaggtgaagttcaactggtacgtggacggcgtggaggtgcacaatgccaagaccaagcccagggaggagcagtacaacagcacctaccgggtggtgtccgtgctgaccgtgctgcaccaggattggctgaacggcaaggagtacaagtgcaaggtgtccaacaaggccctgcctgcccctatcgagaaaaccatcagcaaggccaagggccagcccagagagccccaggtgtacaccctgccccctagcagagatgagctgaccaagaaccaggtgtccctgacctgcctggtgaagggcttctaccccagcgacatcgccgtggagtgggagagcaacggccagcccgagaacaactacaagaccaccccccctgtgctggacagcgatggcagcttcttcctgtacagcaagctgaccgtggacaagagcagatggcagcagggcaacgtgttcagctgcagcgtgatgcacgaggccctgcacaatcactacacccagaagagcctgagcctgtcccctggcaagtga

SEQ ID NO: 122 - DNA, 1026 bp, Artificial Sequence
  Synthetic
gacatccagatgacccagagctacagcagcctgagcgcctctgtgggcgatagagtgaccatcacctgcagagccagccaggccatcgacagctacctgcactggtatcagcagaagcctggcaaggcccctaagctgctgatctacagcgccagcaatctggagaccggcgtgcctagcagattcagcggcagcggctccggcaccgacttcaccctgaccatcagcagcctgctgcctgaggatttcgccacctactactgccagcaggtggtgtggagacctttcaccttcggccagggcaccaaggtggagatcaagcgggtggagcccaagagcagcgataagacccacacctgccccccctgccctgcccccgagctgctgggcggacccagcgtgttcctgttcccccccaagcctaaggacaccctgatgatcagcagaacccccgaggtgacctgcgtggtggtggatgtgagccacgaggaccctgaggtgaagttcaactggtacgtggacggcgtggaggtgcacaatgccaagaccaagcccagggaggagcagtacaacagcacctaccgggtggtgtccgtgctgaccgtgctgcaccaggattggctgaacggcaaggagtacaagtgcaaggtgtccaacaaggccctgcctgcccctatcgagaaaaccatcagcaaggccaagggccagcccagagagccccaggtgtacaccctgccccctagcagagatgagctgaccaagaaccaggtgtccctgacctgcctggtgaagggcttctaccccagcgacatcgccgtggagtgggagagcaacggccagcccgagaacaactacaagaccaccccccctgtgctggacagcgatggcagcttcttcctgtacagcaagctgaccgtggacaagagcagatggcagcagggcaacgtgttcagctgcagcgtgatgcacgaggccctgcacaatcactacacccagaagagcctgagcctgtcccctggcaagtga

SEQ ID NO: 123 - DNA, 1026 bp, Artificial Sequence
  Synthetic
gacatccagatgacccagagccccgccagcctgagcgcctctgtgggcgatagagtgaccatcacctgcagagccagccaggccatcgacagctacctgcactggtatcagcagaagcctggcaaggcccctaagctgctgatctacagcgccagcaatctggagaccggcgtgcctagcagattcagcggcagcggctccggcaccgacttcaccctgaccatcagcagcctgctgcctgaggatttcgccacctactactgccagcaggtggtgtggagacctttcaccttcggccagggcaccaaggtggagatcaagcgggtggagcccaagagcagcgataagacccacacctgccccccctgccctgcccccgagctgctgggcggacccagcgtgttcctgttcccccccaagcctaaggacaccctgatgatcagcagaacccccgaggtgacctgcgtggtggtggatgtgagccacgaggaccctgaggtgaagttcaactggtacgtggacggcgtggaggtgcacaatgccaagaccaagcccagggaggagcagtacaacagcacctaccgggtggtgtccgtgctgaccgtgctgcaccaggattggctgaacggcaaggagtacaagtgcaaggtgtccaacaaggccctgcctgcccctatcgagaaaaccatcagcaaggccaagggccagcccagagagccccaggtgtacaccctgccccctagcagagatgagctgaccaagaaccaggtgtccctgacctgcctggtgaagggcttctaccccagcgacatcgccgtggagtgggagagcaacggccagcccgagaacaactacaagaccaccccccctgtgctggacagcgatggcagcttcttcctgtacagcaagctgaccgtggacaagagcagatggcagcagggcaacgtgttcagctgcagcgtgatgcacgaggccctgcacaatcactacacccagaagagcctgagcctgtcccctggcaagtga

SEQ ID NO: 124 - DNA, 1026 bp, Artificial Sequence
  Synthetic
gacatccagatgacccagagccccctgagcctgagcgcctctgtgggcgatagagtgaccatcacctgcagagccagccaggccatcgacagctacctgcactggtatcagcagaagcctggcaaggcccctaagctgctgatctacagcgccagcaatctggagaccggcgtgcctagcagattcagcggcagcggctccggcaccgacttcaccctgaccatcagcagcctgctgcctgaggatttcgccacctactactgccagcaggtggtgtggagacctttcaccttcggccagggcaccaaggtggagatcaagcgggtggagcccaagagcagcgataagacccacacctgccccccctgccctgcccccgagctgctgggcggacccagcgtgttcctgttcccccccaagcctaaggacaccctgatgatcagcagaacccccgaggtgacctgcgtggtggtggatgtgagccacgaggaccctgaggtgaagttcaactggtacgtggacggcgtggaggtgcacaatgccaagaccaagcccagggaggagcagtacaacagcacctaccgggtggtgtccgtgctgaccgtgctgcaccaggattggctgaacggcaaggagtacaagtgcaaggtgtccaacaaggccctgcctgcccctatcgagaaaaccatcagcaaggccaagggccagcccagagagccccaggtgtacaccctgccccctagcagagatgagctgaccaagaaccaggtgtccctgacctgcctggtgaagggcttctaccccagcgacatcgccgtggagtgggagagcaacggccagcccgagaacaactacaagaccaccccccctgtgctggacagcgatggcagcttcttcctgtacagcaagctgaccgtggacaagagcagatggcagcagggcaacgtgttcagctgcagcgtgatgcacgaggccctgcacaatcactacacccagaagagcctgagcctgtcccctggcaagtga

SEQ ID NO: 125 - DNA, 1026 bp, Artificial Sequence
  Synthetic
gacatccagatgacccagagccccgacagcctgagcgcctctgtgggcgatagagtgaccatcacctgcagagccagccaggccatcgacagctacctgcactggtatcagcagaagcctggcaaggcccctaagctgctgatctacagcgccagcaatctggagaccggcgtgcctagcagattcagcggcagcggctccggcaccgacttcaccctgaccatcagcagcctgctgcctgaggatttcgccacctactactgccagcaggtggtgtggagacctttcaccttcggccagggcaccaaggtggagatcaagcgggtggagcccaagagcagcgataagacccacacctgccccccctgccctgcccccgagctgctgggcggacccagcgtgttcctgttcccccccaagcctaaggacaccctgatgatcagcagaacccccgaggtgacctgcgtggtggtggatgtgagccacgaggaccctgaggtgaagttcaactggtacgtggacggcgtggaggtgcacaatgccaagaccaagcccagggaggagcagtacaacagcacctaccgggtggtgtccgtgctgaccgtgctgcaccaggattggctgaacggcaaggagtacaagtgcaaggtgtccaacaaggccctgcctgcccctatcgagaaaaccatcagcaaggccaagggccagcccagagagccccaggtgtacaccctgccccctagcagagatgagctgaccaagaaccaggtgtccctgacctgcctggtgaagggcttctaccccagcgacatcgccgtggagtgggagagcaacggccagcccgagaacaactacaagaccaccccccctgtgctggacagcgatggcagcttcttcctgtacagcaagctgaccgtggacaagagcagatggcagcagggcaacgtgttcagctgcagcgtgatgcacgaggccctgcacaatcactacacccagaagagcctgagcctgtcccctggcaagtga

SEQ ID NO: 126 - DNA, 1026 bp, Artificial Sequence
  Synthetic
gacatccagatgacccagagccccagcgccctgagcgcctctgtgggcgatagagtgaccatcacctgcagagccagccaggccatcgacagctacctgcactggtatcagcagaagcctggcaaggcccctaagctgctgatctacagcgccagcaatctggagaccggcgtgcctagcagattcagcggcagcggctccggcaccgacttcaccctgaccatcagcagcctgctgcctgaggatttcgccacctactactgccagcaggtggtgtggagacctttcaccttcggccagggcaccaaggtggagatcaagcgggtggagcccaagagcagcgataagacccacacctgccccccctgccctgcccccgagctgctgggcggacccagcgtgttcctgttcccccccaagcctaaggacaccctgatgatcagcagaacccccgaggtgacctgcgtggtggtggatgtgagccacgaggaccctgaggtgaagttcaactggtacgtggacggcgtggaggtgcacaatgccaagaccaagcccagggaggagcagtacaacagcacctaccgggtggtgtccgtgctgaccgtgctgcaccaggattggctgaacggcaaggagtacaagtgcaaggtgtccaacaaggccctgcctgcccctatcgagaaaaccatcagcaaggccaagggccagcccagagagccccaggtgtacaccctgccccctagcagagatgagctgaccaagaaccaggtgtccctgacctgcctggtgaagggcttctaccccagcgacatcgccgtggagtgggagagcaacggccagcccgagaacaactacaagaccaccccccctgtgctggacagcgatggcagcttcttcctgtacagcaagctgaccgtggacaagagcagatggcagcagggcaacgtgttcagctgcagcgtgatgcacgaggccctgcacaatcactacacccagaagagcctgagcctgtcccctggcaagtga

SEQ ID NO: 127 - DNA, 1026 bp, Artificial Sequence
  Synthetic
gacatccagatgacccagagccccagcctgctgagcgcctctgtgggcgatagagtgaccatcacctgcagagccagccaggccatcgacagctacctgcactggtatcagcagaagcctggcaaggcccctaagctgctgatctacagcgccagcaatctggagaccggcgtgcctagcagattcagcggcagcggctccggcaccgacttcaccctgaccatcagcagcctgctgcctgaggatttcgccacctactactgccagcaggtggtgtggagacctttcaccttcggccagggcaccaaggtggagatcaagcgggtggagcccaagagcagcgataagacccacacctgccccccctgccctgcccccgagctgctgggcggacccagcgtgttcctgttcccccccaagcctaaggacaccctgatgatcagcagaacccccgaggtgacctgcgtggtggtggatgtgagccacgaggaccctgaggtgaagttcaactggtacgtggacggcgtggaggtgcacaatgccaagaccaagcccagggaggagcagtacaacagcacctaccgggtggtgtccgtgctgaccgtgctgcaccaggattggctgaacggcaaggagtacaagtgcaaggtgtccaacaaggccctgcctgcccctatcgagaaaaccatcagcaaggccaagggccagcccagagagccccaggtgtacaccctgccccctagcagagatgagctgaccaagaaccaggtgtccctgacctgcctggtgaagggcttctaccccagcgacatcgccgtggagtgggagagcaacggccagcccgagaacaactacaagaccaccccccctgtgctggacagcgatggcagcttcttcctgtacagcaagctgaccgtggacaagagcagatggcagcagggcaacgtgttcagctgcagcgtgatgcacgaggccctgcacaatcactacacccagaagagcctgagcctgtcccctggcaagtga

SEQ ID NO: 128 - DNA, 1026 bp, Artificial Sequence
  Synthetic
gacatccagatgacccagagccccagccagctgagcgcctctgtgggcgatagagtgaccatcacctgcagagccagccaggccatcgacagctacctgcactggtatcagcagaagcctggcaaggcccctaagctgctgatctacagcgccagcaatctggagaccggcgtgcctagcagattcagcggcagcggctccggcaccgacttcaccctgaccatcagcagcctgctgcctgaggatttcgccacctactactgccagcaggtggtgtggagacctttcaccttcggccagggcaccaaggtggagatcaagcgggtggagcccaagagcagcgataagacccacacctgccccccctgccctgcccccgagctgctgggcggacccagcgtgttcctgttcccccccaagcctaaggacaccctgatgatcagcagaacccccgaggtgacctgcgtggtggtggatgtgagccacgaggaccctgaggtgaagttcaactggtacgtggacggcgtggaggtgcacaatgccaagaccaagcccagggaggagcagtacaacagcacctaccgggtggtgtccgtgctgaccgtgctgcaccaggattggctgaacggcaaggagtacaagtgcaaggtgtccaacaaggccctgcctgcccctatcgagaaaaccatcagcaaggccaagggccagcccagagagccccaggtgtacaccctgccccctagcagagatgagctgaccaagaaccaggtgtccctgacctgcctggtgaagggcttctaccccagcgacatcgccgtggagtgggagagcaacggccagcccgagaacaactacaagaccaccccccctgtgctggacagcgatggcagcttcttcctgtacagcaagctgaccgtggacaagagcagatggcagcagggcaacgtgttcagctgcagcgtgatgcacgaggccctgcacaatcactacacccagaagagcctgagcctgtcccctggcaagtga

SEQ ID NO: 129 - DNA, 1026 bp, Artificial Sequence
  Synthetic
gacatccagatgacccagagccccagcagcgccagcgcctctgtgggcgatagagtgaccatcacctgcagagccagccaggccatcgacagctacctgcactggtatcagcagaagcctggcaaggcccctaagctgctgatctacagcgccagcaatctggagaccggcgtgcctagcagattcagcggcagcggctccggcaccgacttcaccctgaccatcagcagcctgctgcctgaggatttcgccacctactactgccagcaggtggtgtggagacctttcaccttcggccagggcaccaaggtggagatcaagcgggtggagcccaagagcagcgataagacccacacctgccccccctgccctgcccccgagctgctgggcggacccagcgtgttcctgttcccccccaagcctaaggacaccctgatgatcagcagaacccccgaggtgacctgcgtggtggtggatgtgagccacgaggaccctgaggtgaagttcaactggtacgtggacggcgtggaggtgcacaatgccaagaccaagcccagggaggagcagtacaacagcacctaccgggtggtgtccgtgctgaccgtgctgcaccaggattggctgaacggcaaggagtacaagtgcaaggtgtccaacaaggccctgcctgcccctatcgagaaaaccatcagcaaggccaagggccagcccagagagccccaggtgtacaccctgccccctagcagagatgagctgaccaagaaccaggtgtccctgacctgcctggtgaagggcttctaccccagcgacatcgccgtggagtgggagagcaacggccagcccgagaacaactacaagaccaccccccctgtgctggacagcgatggcagcttcttcctgtacagcaagctgaccgtggacaagagcagatggcagcagggcaacgtgttcagctgcagcgtgatgcacgaggccctgcacaatcactacacccagaagagcctgagcctgtcccctggcaagtga

SEQ ID NO: 130 - DNA, 1026 bp, Artificial Sequence
  Synthetic
gacatccagatgacccagagccccagcagcagcagcgcctctgtgggcgatagagtgaccatcacctgcagagccagccaggccatcgacagctacctgcactggtatcagcagaagcctggcaaggcccctaagctgctgatctacagcgccagcaatctggagaccggcgtgcctagcagattcagcggcagcggctccggcaccgacttcaccctgaccatcagcagcctgctgcctgaggatttcgccacctactactgccagcaggtggtgtggagacctttcaccttcggccagggcaccaaggtggagatcaagcgggtggagcccaagagcagcgataagacccacacctgccccccctgccctgcccccgagctgctgggcggacccagcgtgttcctgttcccccccaagcctaaggacaccctgatgatcagcagaacccccgaggtgacctgcgtggtggtggatgtgagccacgaggaccctgaggtgaagttcaactggtacgtggacggcgtggaggtgcacaatgccaagaccaagcccagggaggagcagtacaacagcacctaccgggtggtgtccgtgctgaccgtgctgcaccaggattggctgaacggcaaggagtacaagtgcaaggtgtccaacaaggccctgcctgcccctatcgagaaaaccatcagcaaggccaagggccagcccagagagccccaggtgtacaccctgccccctagcagagatgagctgaccaagaaccaggtgtccctgacctgcctggtgaagggcttctaccccagcgacatcgccgtggagtgggagagcaacggccagcccgagaacaactacaagaccaccccccctgtgctggacagcgatggcagcttcttcctgtacagcaagctgaccgtggacaagagcagatggcagcagggcaacgtgttcagctgcagcgtgatgcacgaggccctgcacaatcactacacccagaagagcctgagcctgtcccctggcaagtga

SEQ ID NO: 131 - DNA, 1026 bp, Artificial Sequence
  Synthetic
gacatccagatgacccagagccccagcagccagagcgcctctgtgggcgatagagtgaccatcacctgcagagccagccaggccatcgacagctacctgcactggtatcagcagaagcctggcaaggcccctaagctgctgatctacagcgccagcaatctggagaccggcgtgcctagcagattcagcggcagcggctccggcaccgacttcaccctgaccatcagcagcctgctgcctgaggatttcgccacctactactgccagcaggtggtgtggagacctttcaccttcggccagggcaccaaggtggagatcaagcgggtggagcccaagagcagcgataagacccacacctgccccccctgccctgcccccgagctgctgggcggacccagcgtgttcctgttcccccccaagcctaaggacaccctgatgatcagcagaacccccgaggtgacctgcgtggtggtggatgtgagccacgaggaccctgaggtgaagttcaactggtacgtggacggcgtggaggtgcacaatgccaagaccaagcccagggaggagcagtacaacagcacctaccgggtggtgtccgtgctgaccgtgctgcaccaggattggctgaacggcaaggagtacaagtgcaaggtgtccaacaaggccctgcctgcccctatcgagaaaaccatcagcaaggccaagggccagcccagagagccccaggtgtacaccctgccccctagcagagatgagctgaccaagaaccaggtgtccctgacctgcctggtgaagggcttctaccccagcgacatcgccgtggagtgggagagcaacggccagcccgagaacaactacaagaccaccccccctgtgctggacagcgatggcagcttcttcctgtacagcaagctgaccgtggacaagagcagatggcagcagggcaacgtgttcagctgcagcgtgatgcacgaggccctgcacaatcactacacccagaagagcctgagcctgtcccctggcaagtga

SEQ ID NO: 132 - DNA, 1026 bp, Artificial Sequence
  Synthetic
gacatccagatgacccagagccccagcagcctggccgcctctgtgggcgatagagtgaccatcacctgcagagccagccaggccatcgacagctacctgcactggtatcagcagaagcctggcaaggcccctaagctgctgatctacagcgccagcaatctggagaccggcgtgcctagcagattcagcggcagcggctccggcaccgacttcaccctgaccatcagcagcctgctgcctgaggatttcgccacctactactgccagcaggtggtgtggagacctttcaccttcggccagggcaccaaggtggagatcaagcgggtggagcccaagagcagcgataagacccacacctgccccccctgccctgcccccgagctgctgggcggacccagcgtgttcctgttcccccccaagcctaaggacaccctgatgatcagcagaacccccgaggtgacctgcgtggtggtggatgtgagccacgaggaccctgaggtgaagttcaactggtacgtggacggcgtggaggtgcacaatgccaagaccaagcccagggaggagcagtacaacagcacctaccgggtggtgtccgtgctgaccgtgctgcaccaggattggctgaacggcaaggagtacaagtgcaaggtgtccaacaaggccctgcctgcccctatcgagaaaaccatcagcaaggccaagggccagcccagagagccccaggtgtacaccctgccccctagcagagatgagctgaccaagaaccaggtgtccctgacctgcctggtgaagggcttctaccccagcgacatcgccgtggagtgggagagcaacggccagcccgagaacaactacaagaccaccccccctgtgctggacagcgatggcagcttcttcctgtacagcaagctgaccgtggacaagagcagatggcagcagggcaacgtgttcagctgcagcgtgatgcacgaggccctgcacaatcactacacccagaagagcctgagcctgtcccctggcaagtga

SEQ ID NO: 133 - DNA, 1026 bp, Artificial Sequence
  Synthetic
gacatccagatgacccagagccccagcagcctgcccgcctctgtgggcgatagagtgaccatcacctgcagagccagccaggccatcgacagctacctgcactggtatcagcagaagcctggcaaggcccctaagctgctgatctacagcgccagcaatctggagaccggcgtgcctagcagattcagcggcagcggctccggcaccgacttcaccctgaccatcagcagcctgctgcctgaggatttcgccacctactactgccagcaggtggtgtggagacctttcaccttcggccagggcaccaaggtggagatcaagcgggtggagcccaagagcagcgataagacccacacctgccccccctgccctgcccccgagctgctgggcggacccagcgtgttcctgttcccccccaagcctaaggacaccctgatgatcagcagaacccccgaggtgacctgcgtggtggtggatgtgagccacgaggaccctgaggtgaagttcaactggtacgtggacggcgtggaggtgcacaatgccaagaccaagcccagggaggagcagtacaacagcacctaccgggtggtgtccgtgctgaccgtgctgcaccaggattggctgaacggcaaggagtacaagtgcaaggtgtccaacaaggccctgcctgcccctatcgagaaaaccatcagcaaggccaagggccagcccagagagccccaggtgtacaccctgccccctagcagagatgagctgaccaagaaccaggtgtccctgacctgcctggtgaagggcttctaccccagcgacatcgccgtggagtgggagagcaacggccagcccgagaacaactacaagaccaccccccctgtgctggacagcgatggcagcttcttcctgtacagcaagctgaccgtggacaagagcagatggcagcagggcaacgtgttcagctgcagcgtgatgcacgaggccctgcacaatcactacacccagaagagcctgagcctgtcccctggcaagtga

SEQ ID NO: 134 - DNA, 1026 bp, Artificial Sequence
  Synthetic
gacatccagatgacccagagccccagcagcctgagcctgtctgtgggcgatagagtgaccatcacctgcagagccagccaggccatcgacagctacctgcactggtatcagcagaagcctggcaaggcccctaagctgctgatctacagcgccagcaatctggagaccggcgtgcctagcagattcagcggcagcggctccggcaccgacttcaccctgaccatcagcagcctgctgcctgaggatttcgccacctactactgccagcaggtggtgtggagacctttcaccttcggccagggcaccaaggtggagatcaagcgggtggagcccaagagcagcgataagacccacacctgccccccctgccctgcccccgagctgctgggcggacccagcgtgttcctgttcccccccaagcctaaggacaccctgatgatcagcagaacccccgaggtgacctgcgtggtggtggatgtgagccacgaggaccctgaggtgaagttcaactggtacgtggacggcgtggaggtgcacaatgccaagaccaagcccagggaggagcagtacaacagcacctaccgggtggtgtccgtgctgaccgtgctgcaccaggattggctgaacggcaaggagtacaagtgcaaggtgtccaacaaggccctgcctgcccctatcgagaaaaccatcagcaaggccaagggccagcccagagagccccaggtgtacaccctgccccctagcagagatgagctgaccaagaaccaggtgtccctgacctgcctggtgaagggcttctaccccagcgacatcgccgtggagtgggagagcaacggccagcccgagaacaactacaagaccaccccccctgtgctggacagcgatggcagcttcttcctgtacagcaagctgaccgtggacaagagcagatggcagcagggcaacgtgttcagctgcagcgtgatgcacgaggccctgcacaatcactacacccagaagagcctgagcctgtcccctggcaagtga

SEQ ID NO: 135 - DNA, 1026 bp, Artificial Sequence
  Synthetic
gacatccagatgacccagagccccagcagcctgagcgccgccgtgggcgatagagtgaccatcacctgcagagccagccaggccatcgacagctacctgcactggtatcagcagaagcctggcaaggcccctaagctgctgatctacagcgccagcaatctggagaccggcgtgcctagcagattcagcggcagcggctccggcaccgacttcaccctgaccatcagcagcctgctgcctgaggatttcgccacctactactgccagcaggtggtgtggagacctttcaccttcggccagggcaccaaggtggagatcaagcgggtggagcccaagagcagcgataagacccacacctgccccccctgccctgcccccgagctgctgggcggacccagcgtgttcctgttcccccccaagcctaaggacaccctgatgatcagcagaacccccgaggtgacctgcgtggtggtggatgtgagccacgaggaccctgaggtgaagttcaactggtacgtggacggcgtggaggtgcacaatgccaagaccaagcccagggaggagcagtacaacagcacctaccgggtggtgtccgtgctgaccgtgctgcaccaggattggctgaacggcaaggagtacaagtgcaaggtgtccaacaaggccctgcctgcccctatcgagaaaaccatcagcaaggccaagggccagcccagagagccccaggtgtacaccctgccccctagcagagatgagctgaccaagaaccaggtgtccctgacctgcctggtgaagggcttctaccccagcgacatcgccgtggagtgggagagcaacggccagcccgagaacaactacaagaccaccccccctgtgctggacagcgatggcagcttcttcctgtacagcaagctgaccgtggacaagagcagatggcagcagggcaacgtgttcagctgcagcgtgatgcacgaggccctgcacaatcactacacccagaagagcctgagcctgtcccctggcaagtga

SEQ ID NO: 136 - DNA, 1026 bp, Artificial Sequence
  Synthetic
gacatccagatgacccagagccccagcagcctgagcgcctacgtgggcgatagagtgaccatcacctgcagagccagccaggccatcgacagctacctgcactggtatcagcagaagcctggcaaggcccctaagctgctgatctacagcgccagcaatctggagaccggcgtgcctagcagattcagcggcagcggctccggcaccgacttcaccctgaccatcagcagcctgctgcctgaggatttcgccacctactactgccagcaggtggtgtggagacctttcaccttcggccagggcaccaaggtggagatcaagcgggtggagcccaagagcagcgataagacccacacctgccccccctgccctgcccccgagctgctgggcggacccagcgtgttcctgttcccccccaagcctaaggacaccctgatgatcagcagaacccccgaggtgacctgcgtggtggtggatgtgagccacgaggaccctgaggtgaagttcaactggtacgtggacggcgtggaggtgcacaatgccaagaccaagcccagggaggagcagtacaacagcacctaccgggtggtgtccgtgctgaccgtgctgcaccaggattggctgaacggcaaggagtacaagtgcaaggtgtccaacaaggccctgcctgcccctatcgagaaaaccatcagcaaggccaagggccagcccagagagccccaggtgtacaccctgccccctagcagagatgagctgaccaagaaccaggtgtccctgacctgcctggtgaagggcttctaccccagcgacatcgccgtggagtgggagagcaacggccagcccgagaacaactacaagaccaccccccctgtgctggacagcgatggcagcttcttcctgtacagcaagctgaccgtggacaagagcagatggcagcagggcaacgtgttcagctgcagcgtgatgcacgaggccctgcacaatcactacacccagaagagcctgagcctgtcccctggcaagtga

SEQ ID NO: 137 - DNA, 1026 bp, Artificial Sequence
  Synthetic
gacatccagatgacccagagccccagcagcctgagcgcctctgccggcgatagagtgaccatcacctgcagagccagccaggccatcgacagctacctgcactggtatcagcagaagcctggcaaggcccctaagctgctgatctacagcgccagcaatctggagaccggcgtgcctagcagattcagcggcagcggctccggcaccgacttcaccctgaccatcagcagcctgctgcctgaggatttcgccacctactactgccagcaggtggtgtggagacctttcaccttcggccagggcaccaaggtggagatcaagcgggtggagcccaagagcagcgataagacccacacctgccccccctgccctgcccccgagctgctgggcggacccagcgtgttcctgttcccccccaagcctaaggacaccctgatgatcagcagaacccccgaggtgacctgcgtggtggtggatgtgagccacgaggaccctgaggtgaagttcaactggtacgtggacggcgtggaggtgcacaatgccaagaccaagcccagggaggagcagtacaacagcacctaccgggtggtgtccgtgctgaccgtgctgcaccaggattggctgaacggcaaggagtacaagtgcaaggtgtccaacaaggccctgcctgcccctatcgagaaaaccatcagcaaggccaagggccagcccagagagccccaggtgtacaccctgccccctagcagagatgagctgaccaagaaccaggtgtccctgacctgcctggtgaagggcttctaccccagcgacatcgccgtggagtgggagagcaacggccagcccgagaacaactacaagaccaccccccctgtgctggacagcgatggcagcttcttcctgtacagcaagctgaccgtggacaagagcagatggcagcagggcaacgtgttcagctgcagcgtgatgcacgaggccctgcacaatcactacacccagaagagcctgagcctgtcccctggcaagtga

SEQ ID NO: 138 - DNA, 1026 bp, Artificial Sequence
  Synthetic
gacatccagatgacccagagccccagcagcctgagcgcctctcccggcgatagagtgaccatcacctgcagagccagccaggccatcgacagctacctgcactggtatcagcagaagcctggcaaggcccctaagctgctgatctacagcgccagcaatctggagaccggcgtgcctagcagattcagcggcagcggctccggcaccgacttcaccctgaccatcagcagcctgctgcctgaggatttcgccacctactactgccagcaggtggtgtggagacctttcaccttcggccagggcaccaaggtggagatcaagcgggtggagcccaagagcagcgataagacccacacctgccccccctgccctgcccccgagctgctgggcggacccagcgtgttcctgttcccccccaagcctaaggacaccctgatgatcagcagaacccccgaggtgacctgcgtggtggtggatgtgagccacgaggaccctgaggtgaagttcaactggtacgtggacggcgtggaggtgcacaatgccaagaccaagcccagggaggagcagtacaacagcacctaccgggtggtgtccgtgctgaccgtgctgcaccaggattggctgaacggcaaggagtacaagtgcaaggtgtccaacaaggccctgcctgcccctatcgagaaaaccatcagcaaggccaagggccagcccagagagccccaggtgtacaccctgccccctagcagagatgagctgaccaagaaccaggtgtccctgacctgcctggtgaagggcttctaccccagcgacatcgccgtggagtgggagagcaacggccagcccgagaacaactacaagaccaccccccctgtgctggacagcgatggcagcttcttcctgtacagcaagctgaccgtggacaagagcagatggcagcagggcaacgtgttcagctgcagcgtgatgcacgaggccctgcacaatcactacacccagaagagcctgagcctgtcccctggcaagtga

SEQ ID NO: 139 - DNA, 1026 bp, Artificial Sequence
  Synthetic
gacatccagatgacccagagccccagcagcctgagcgcctctgtgtacgatagagtgaccatcacctgcagagccagccaggccatcgacagctacctgcactggtatcagcagaagcctggcaaggcccctaagctgctgatctacagcgccagcaatctggagaccggcgtgcctagcagattcagcggcagcggctccggcaccgacttcaccctgaccatcagcagcctgctgcctgaggatttcgccacctactactgccagcaggtggtgtggagacctttcaccttcggccagggcaccaaggtggagatcaagcgggtggagcccaagagcagcgataagacccacacctgccccccctgccctgcccccgagctgctgggcggacccagcgtgttcctgttcccccccaagcctaaggacaccctgatgatcagcagaacccccgaggtgacctgcgtggtggtggatgtgagccacgaggaccctgaggtgaagttcaactggtacgtggacggcgtggaggtgcacaatgccaagaccaagcccagggaggagcagtacaacagcacctaccgggtggtgtccgtgctgaccgtgctgcaccaggattggctgaacggcaaggagtacaagtgcaaggtgtccaacaaggccctgcctgcccctatcgagaaaaccatcagcaaggccaagggccagcccagagagccccaggtgtacaccctgccccctagcagagatgagctgaccaagaaccaggtgtccctgacctgcctggtgaagggcttctaccccagcgacatcgccgtggagtgggagagcaacggccagcccgagaacaactacaagaccaccccccctgtgctggacagcgatggcagcttcttcctgtacagcaagctgaccgtggacaagagcagatggcagcagggcaacgtgttcagctgcagcgtgatgcacgaggccctgcacaatcactacacccagaagagcctgagcctgtcccctggcaagtga

SEQ ID NO: 140 - DNA, 1026 bp, Artificial Sequence
  Synthetic
gacatccagatgacccagagccccagcagcctgagcgcctctgtgaaggatagagtgaccatcacctgcagagccagccaggccatcgacagctacctgcactggtatcagcagaagcctggcaaggcccctaagctgctgatctacagcgccagcaatctggagaccggcgtgcctagcagattcagcggcagcggctccggcaccgacttcaccctgaccatcagcagcctgctgcctgaggatttcgccacctactactgccagcaggtggtgtggagacctttcaccttcggccagggcaccaaggtggagatcaagcgggtggagcccaagagcagcgataagacccacacctgccccccctgccctgcccccgagctgctgggcggacccagcgtgttcctgttcccccccaagcctaaggacaccctgatgatcagcagaacccccgaggtgacctgcgtggtggtggatgtgagccacgaggaccctgaggtgaagttcaactggtacgtggacggcgtggaggtgcacaatgccaagaccaagcccagggaggagcagtacaacagcacctaccgggtggtgtccgtgctgaccgtgctgcaccaggattggctgaacggcaaggagtacaagtgcaaggtgtccaacaaggccctgcctgcccctatcgagaaaaccatcagcaaggccaagggccagcccagagagccccaggtgtacaccctgccccctagcagagatgagctgaccaagaaccaggtgtccctgacctgcctggtgaagggcttctaccccagcgacatcgccgtggagtgggagagcaacggccagcccgagaacaactacaagaccaccccccctgtgctggacagcgatggcagcttcttcctgtacagcaagctgaccgtggacaagagcagatggcagcagggcaacgtgttcagctgcagcgtgatgcacgaggccctgcacaatcactacacccagaagagcctgagcctgtcccctggcaagtga

SEQ ID NO: 141 - DNA, 1026 bp, Artificial Sequence
  Synthetic
gacatccagatgacccagagccccagcagcctgagcgcctctgtgggcgccagagtgaccatcacctgcagagccagccaggccatcgacagctacctgcactggtatcagcagaagcctggcaaggcccctaagctgctgatctacagcgccagcaatctggagaccggcgtgcctagcagattcagcggcagcggctccggcaccgacttcaccctgaccatcagcagcctgctgcctgaggatttcgccacctactactgccagcaggtggtgtggagacctttcaccttcggccagggcaccaaggtggagatcaagcgggtggagcccaagagcagcgataagacccacacctgccccccctgccctgcccccgagctgctgggcggacccagcgtgttcctgttcccccccaagcctaaggacaccctgatgatcagcagaacccccgaggtgacctgcgtggtggtggatgtgagccacgaggaccctgaggtgaagttcaactggtacgtggacggcgtggaggtgcacaatgccaagaccaagcccagggaggagcagtacaacagcacctaccgggtggtgtccgtgctgaccgtgctgcaccaggattggctgaacggcaaggagtacaagtgcaaggtgtccaacaaggccctgcctgcccctatcgagaaaaccatcagcaaggccaagggccagcccagagagccccaggtgtacaccctgccccctagcagagatgagctgaccaagaaccaggtgtccctgacctgcctggtgaagggcttctaccccagcgacatcgccgtggagtgggagagcaacggccagcccgagaacaactacaagaccaccccccctgtgctggacagcgatggcagcttcttcctgtacagcaagctgaccgtggacaagagcagatggcagcagggcaacgtgttcagctgcagcgtgatgcacgaggccctgcacaatcactacacccagaagagcctgagcctgtcccctggcaagtga

SEQ ID NO: 142 - DNA, 1026 bp, Artificial Sequence
  Synthetic
gacatccagatgacccagagccccagcagcctgagcgcctctgtgggccagagagtgaccatcacctgcagagccagccaggccatcgacagctacctgcactggtatcagcagaagcctggcaaggcccctaagctgctgatctacagcgccagcaatctggagaccggcgtgcctagcagattcagcggcagcggctccggcaccgacttcaccctgaccatcagcagcctgctgcctgaggatttcgccacctactactgccagcaggtggtgtggagacctttcaccttcggccagggcaccaaggtggagatcaagcgggtggagcccaagagcagcgataagacccacacctgccccccctgccctgcccccgagctgctgggcggacccagcgtgttcctgttcccccccaagcctaaggacaccctgatgatcagcagaacccccgaggtgacctgcgtggtggtggatgtgagccacgaggaccctgaggtgaagttcaactggtacgtggacggcgtggaggtgcacaatgccaagaccaagcccagggaggagcagtacaacagcacctaccgggtggtgtccgtgctgaccgtgctgcaccaggattggctgaacggcaaggagtacaagtgcaaggtgtccaacaaggccctgcctgcccctatcgagaaaaccatcagcaaggccaagggccagcccagagagccccaggtgtacaccctgccccctagcagagatgagctgaccaagaaccaggtgtccctgacctgcctggtgaagggcttctaccccagcgacatcgccgtggagtgggagagcaacggccagcccgagaacaactacaagaccaccccccctgtgctggacagcgatggcagcttcttcctgtacagcaagctgaccgtggacaagagcagatggcagcagggcaacgtgttcagctgcagcgtgatgcacgaggccctgcacaatcactacacccagaagagcctgagcctgtcccctggcaagtga

SEQ ID NO: 143 - DNA, 1026 bp, Artificial Sequence
  Synthetic
gacatccagatgacccagagccccagcagcctgagcgcctctgtgggcgatgccgtgaccatcacctgcagagccagccaggccatcgacagctacctgcactggtatcagcagaagcctggcaaggcccctaagctgctgatctacagcgccagcaatctggagaccggcgtgcctagcagattcagcggcagcggctccggcaccgacttcaccctgaccatcagcagcctgctgcctgaggatttcgccacctactactgccagcaggtggtgtggagacctttcaccttcggccagggcaccaaggtggagatcaagcgggtggagcccaagagcagcgataagacccacacctgccccccctgccctgcccccgagctgctgggcggacccagcgtgttcctgttcccccccaagcctaaggacaccctgatgatcagcagaacccccgaggtgacctgcgtggtggtggatgtgagccacgaggaccctgaggtgaagttcaactggtacgtggacggcgtggaggtgcacaatgccaagaccaagcccagggaggagcagtacaacagcacctaccgggtggtgtccgtgctgaccgtgctgcaccaggattggctgaacggcaaggagtacaagtgcaaggtgtccaacaaggccctgcctgcccctatcgagaaaaccatcagcaaggccaagggccagcccagagagccccaggtgtacaccctgccccctagcagagatgagctgaccaagaaccaggtgtccctgacctgcctggtgaagggcttctaccccagcgacatcgccgtggagtgggagagcaacggccagcccgagaacaactacaagaccaccccccctgtgctggacagcgatggcagcttcttcctgtacagcaagctgaccgtggacaagagcagatggcagcagggcaacgtgttcagctgcagcgtgatgcacgaggccctgcacaatcactacacccagaagagcctgagcctgtcccctggcaagtga

SEQ ID NO: 144 - DNA, 1026 bp, Artificial Sequence
  Synthetic
gacatccagatgacccagagccccagcagcctgagcgcctctgtgggcgattacgtgaccatcacctgcagagccagccaggccatcgacagctacctgcactggtatcagcagaagcctggcaaggcccctaagctgctgatctacagcgccagcaatctggagaccggcgtgcctagcagattcagcggcagcggctccggcaccgacttcaccctgaccatcagcagcctgctgcctgaggatttcgccacctactactgccagcaggtggtgtggagacctttcaccttcggccagggcaccaaggtggagatcaagcgggtggagcccaagagcagcgataagacccacacctgccccccctgccctgcccccgagctgctgggcggacccagcgtgttcctgttcccccccaagcctaaggacaccctgatgatcagcagaacccccgaggtgacctgcgtggtggtggatgtgagccacgaggaccctgaggtgaagttcaactggtacgtggacggcgtggaggtgcacaatgccaagaccaagcccagggaggagcagtacaacagcacctaccgggtggtgtccgtgctgaccgtgctgcaccaggattggctgaacggcaaggagtacaagtgcaaggtgtccaacaaggccctgcctgcccctatcgagaaaaccatcagcaaggccaagggccagcccagagagccccaggtgtacaccctgccccctagcagagatgagctgaccaagaaccaggtgtccctgacctgcctggtgaagggcttctaccccagcgacatcgccgtggagtgggagagcaacggccagcccgagaacaactacaagaccaccccccctgtgctggacagcgatggcagcttcttcctgtacagcaagctgaccgtggacaagagcagatggcagcagggcaacgtgttcagctgcagcgtgatgcacgaggccctgcacaatcactacacccagaagagcctgagcctgtcccctggcaagtga

SEQ ID NO: 145 - DNA, 1026 bp, Artificial Sequence
  Synthetic
gacatccagatgacccagagccccagcagcctgagcgcctctgtgggcgatcccgtgaccatcacctgcagagccagccaggccatcgacagctacctgcactggtatcagcagaagcctggcaaggcccctaagctgctgatctacagcgccagcaatctggagaccggcgtgcctagcagattcagcggcagcggctccggcaccgacttcaccctgaccatcagcagcctgctgcctgaggatttcgccacctactactgccagcaggtggtgtggagacctttcaccttcggccagggcaccaaggtggagatcaagcgggtggagcccaagagcagcgataagacccacacctgccccccctgccctgcccccgagctgctgggcggacccagcgtgttcctgttcccccccaagcctaaggacaccctgatgatcagcagaacccccgaggtgacctgcgtggtggtggatgtgagccacgaggaccctgaggtgaagttcaactggtacgtggacggcgtggaggtgcacaatgccaagaccaagcccagggaggagcagtacaacagcacctaccgggtggtgtccgtgctgaccgtgctgcaccaggattggctgaacggcaaggagtacaagtgcaaggtgtccaacaaggccctgcctgcccctatcgagaaaaccatcagcaaggccaagggccagcccagagagccccaggtgtacaccctgccccctagcagagatgagctgaccaagaaccaggtgtccctgacctgcctggtgaagggcttctaccccagcgacatcgccgtggagtgggagagcaacggccagcccgagaacaactacaagaccaccccccctgtgctggacagcgatggcagcttcttcctgtacagcaagctgaccgtggacaagagcagatggcagcagggcaacgtgttcagctgcagcgtgatgcacgaggccctgcacaatcactacacccagaagagcctgagcctgtcccctggcaagtga

SEQ ID NO: 146 - DNA, 1026 bp, Artificial Sequence
  Synthetic
gacatccagatgacccagagccccagcagcctgagcgcctctgtgggcgataaggtgaccatcacctgcagagccagccaggccatcgacagctacctgcactggtatcagcagaagcctggcaaggcccctaagctgctgatctacagcgccagcaatctggagaccggcgtgcctagcagattcagcggcagcggctccggcaccgacttcaccctgaccatcagcagcctgctgcctgaggatttcgccacctactactgccagcaggtggtgtggagacctttcaccttcggccagggcaccaaggtggagatcaagcgggtggagcccaagagcagcgataagacccacacctgccccccctgccctgcccccgagctgctgggcggacccagcgtgttcctgttcccccccaagcctaaggacaccctgatgatcagcagaacccccgaggtgacctgcgtggtggtggatgtgagccacgaggaccctgaggtgaagttcaactggtacgtggacggcgtggaggtgcacaatgccaagaccaagcccagggaggagcagtacaacagcacctaccgggtggtgtccgtgctgaccgtgctgcaccaggattggctgaacggcaaggagtacaagtgcaaggtgtccaacaaggccctgcctgcccctatcgagaaaaccatcagcaaggccaagggccagcccagagagccccaggtgtacaccctgccccctagcagagatgagctgaccaagaaccaggtgtccctgacctgcctggtgaagggcttctaccccagcgacatcgccgtggagtgggagagcaacggccagcccgagaacaactacaagaccaccccccctgtgctggacagcgatggcagcttcttcctgtacagcaagctgaccgtggacaagagcagatggcagcagggcaacgtgttcagctgcagcgtgatgcacgaggccctgcacaatcactacacccagaagagcctgagcctgtcccctggcaagtga

SEQ ID NO: 147 - DNA, 1026 bp, Artificial Sequence
  Synthetic
gacatccagatgacccagagccccagcagcctgagcgcctctgtgggcgatagagccaccatcacctgcagagccagccaggccatcgacagctacctgcactggtatcagcagaagcctggcaaggcccctaagctgctgatctacagcgccagcaatctggagaccggcgtgcctagcagattcagcggcagcggctccggcaccgacttcaccctgaccatcagcagcctgctgcctgaggatttcgccacctactactgccagcaggtggtgtggagacctttcaccttcggccagggcaccaaggtggagatcaagcgggtggagcccaagagcagcgataagacccacacctgccccccctgccctgcccccgagctgctgggcggacccagcgtgttcctgttcccccccaagcctaaggacaccctgatgatcagcagaacccccgaggtgacctgcgtggtggtggatgtgagccacgaggaccctgaggtgaagttcaactggtacgtggacggcgtggaggtgcacaatgccaagaccaagcccagggaggagcagtacaacagcacctaccgggtggtgtccgtgctgaccgtgctgcaccaggattggctgaacggcaaggagtacaagtgcaaggtgtccaacaaggccctgcctgcccctatcgagaaaaccatcagcaaggccaagggccagcccagagagccccaggtgtacaccctgccccctagcagagatgagctgaccaagaaccaggtgtccctgacctgcctggtgaagggcttctaccccagcgacatcgccgtggagtgggagagcaacggccagcccgagaacaactacaagaccaccccccctgtgctggacagcgatggcagcttcttcctgtacagcaagctgaccgtggacaagagcagatggcagcagggcaacgtgttcagctgcagcgtgatgcacgaggccctgcacaatcactacacccagaagagcctgagcctgtcccctggcaagtga

SEQ ID NO: 148 - DNA, 1026 bp, Artificial Sequence
  Synthetic
gacatccagatgacccagagccccagcagcctgagcgcctctgtgggcgatagatacaccatcacctgcagagccagccaggccatcgacagctacctgcactggtatcagcagaagcctggcaaggcccctaagctgctgatctacagcgccagcaatctggagaccggcgtgcctagcagattcagcggcagcggctccggcaccgacttcaccctgaccatcagcagcctgctgcctgaggatttcgccacctactactgccagcaggtggtgtggagacctttcaccttcggccagggcaccaaggtggagatcaagcgggtggagcccaagagcagcgataagacccacacctgccccccctgccctgcccccgagctgctgggcggacccagcgtgttcctgttcccccccaagcctaaggacaccctgatgatcagcagaacccccgaggtgacctgcgtggtggtggatgtgagccacgaggaccctgaggtgaagttcaactggtacgtggacggcgtggaggtgcacaatgccaagaccaagcccagggaggagcagtacaacagcacctaccgggtggtgtccgtgctgaccgtgctgcaccaggattggctgaacggcaaggagtacaagtgcaaggtgtccaacaaggccctgcctgcccctatcgagaaaaccatcagcaaggccaagggccagcccagagagccccaggtgtacaccctgccccctagcagagatgagctgaccaagaaccaggtgtccctgacctgcctggtgaagggcttctaccccagcgacatcgccgtggagtgggagagcaacggccagcccgagaacaactacaagaccaccccccctgtgctggacagcgatggcagcttcttcctgtacagcaagctgaccgtggacaagagcagatggcagcagggcaacgtgttcagctgcagcgtgatgcacgaggccctgcacaatcactacacccagaagagcctgagcctgtcccctggcaagtga

SEQ ID NO: 149 - DNA, 1026 bp, Artificial Sequence
  Synthetic
gacatccagatgacccagagccccagcagcctgagcgcctctgtgggcgatagagtggccatcacctgcagagccagccaggccatcgacagctacctgcactggtatcagcagaagcctggcaaggcccctaagctgctgatctacagcgccagcaatctggagaccggcgtgcctagcagattcagcggcagcggctccggcaccgacttcaccctgaccatcagcagcctgctgcctgaggatttcgccacctactactgccagcaggtggtgtggagacctttcaccttcggccagggcaccaaggtggagatcaagcgggtggagcccaagagcagcgataagacccacacctgccccccctgccctgcccccgagctgctgggcggacccagcgtgttcctgttcccccccaagcctaaggacaccctgatgatcagcagaacccccgaggtgacctgcgtggtggtggatgtgagccacgaggaccctgaggtgaagttcaactggtacgtggacggcgtggaggtgcacaatgccaagaccaagcccagggaggagcagtacaacagcacctaccgggtggtgtccgtgctgaccgtgctgcaccaggattggctgaacggcaaggagtacaagtgcaaggtgtccaacaaggccctgcctgcccctatcgagaaaaccatcagcaaggccaagggccagcccagagagccccaggtgtacaccctgccccctagcagagatgagctgaccaagaaccaggtgtccctgacctgcctggtgaagggcttctaccccagcgacatcgccgtggagtgggagagcaacggccagcccgagaacaactacaagaccaccccccctgtgctggacagcgatggcagcttcttcctgtacagcaagctgaccgtggacaagagcagatggcagcagggcaacgtgttcagctgcagcgtgatgcacgaggccctgcacaatcactacacccagaagagcctgagcctgtcccctggcaagtga

SEQ ID NO: 150 - DNA, 1026 bp, Artificial Sequence
  Synthetic
gacatccagatgacccagagccccagcagcctgagcgcctctgtgggcgatagagtgaccgccacctgcagagccagccaggccatcgacagctacctgcactggtatcagcagaagcctggcaaggcccctaagctgctgatctacagcgccagcaatctggagaccggcgtgcctagcagattcagcggcagcggctccggcaccgacttcaccctgaccatcagcagcctgctgcctgaggatttcgccacctactactgccagcaggtggtgtggagacctttcaccttcggccagggcaccaaggtggagatcaagcgggtggagcccaagagcagcgataagacccacacctgccccccctgccctgcccccgagctgctgggcggacccagcgtgttcctgttcccccccaagcctaaggacaccctgatgatcagcagaacccccgaggtgacctgcgtggtggtggatgtgagccacgaggaccctgaggtgaagttcaactggtacgtggacggcgtggaggtgcacaatgccaagaccaagcccagggaggagcagtacaacagcacctaccgggtggtgtccgtgctgaccgtgctgcaccaggattggctgaacggcaaggagtacaagtgcaaggtgtccaacaaggccctgcctgcccctatcgagaaaaccatcagcaaggccaagggccagcccagagagccccaggtgtacaccctgccccctagcagagatgagctgaccaagaaccaggtgtccctgacctgcctggtgaagggcttctaccccagcgacatcgccgtggagtgggagagcaacggccagcccgagaacaactacaagaccaccccccctgtgctggacagcgatggcagcttcttcctgtacagcaagctgaccgtggacaagagcagatggcagcagggcaacgtgttcagctgcagcgtgatgcacgaggccctgcacaatcactacacccagaagagcctgagcctgtcccctggcaagtga

SEQ ID NO: 151 - DNA, 1026 bp, Artificial Sequence
  Synthetic
gacatccagatgacccagagccccagcagcctgagcgcctctgtgggcgatagagtgaccctgacctgcagagccagccaggccatcgacagctacctgcactggtatcagcagaagcctggcaaggcccctaagctgctgatctacagcgccagcaatctggagaccggcgtgcctagcagattcagcggcagcggctccggcaccgacttcaccctgaccatcagcagcctgctgcctgaggatttcgccacctactactgccagcaggtggtgtggagacctttcaccttcggccagggcaccaaggtggagatcaagcgggtggagcccaagagcagcgataagacccacacctgccccccctgccctgcccccgagctgctgggcggacccagcgtgttcctgttcccccccaagcctaaggacaccctgatgatcagcagaacccccgaggtgacctgcgtggtggtggatgtgagccacgaggaccctgaggtgaagttcaactggtacgtggacggcgtggaggtgcacaatgccaagaccaagcccagggaggagcagtacaacagcacctaccgggtggtgtccgtgctgaccgtgctgcaccaggattggctgaacggcaaggagtacaagtgcaaggtgtccaacaaggccctgcctgcccctatcgagaaaaccatcagcaaggccaagggccagcccagagagccccaggtgtacaccctgccccctagcagagatgagctgaccaagaaccaggtgtccctgacctgcctggtgaagggcttctaccccagcgacatcgccgtggagtgggagagcaacggccagcccgagaacaactacaagaccaccccccctgtgctggacagcgatggcagcttcttcctgtacagcaagctgaccgtggacaagagcagatggcagcagggcaacgtgttcagctgcagcgtgatgcacgaggccctgcacaatcactacacccagaagagcctgagcctgtcccctggcaagtga

SEQ ID NO: 152 - DNA, 1026 bp, Artificial Sequence
  Synthetic
gacatccagatgacccagagccccagcagcctgagcgcctctgtgggcgatagagtgaccatcgcctgcagagccagccaggccatcgacagctacctgcactggtatcagcagaagcctggcaaggcccctaagctgctgatctacagcgccagcaatctggagaccggcgtgcctagcagattcagcggcagcggctccggcaccgacttcaccctgaccatcagcagcctgctgcctgaggatttcgccacctactactgccagcaggtggtgtggagacctttcaccttcggccagggcaccaaggtggagatcaagcgggtggagcccaagagcagcgataagacccacacctgccccccctgccctgcccccgagctgctgggcggacccagcgtgttcctgttcccccccaagcctaaggacaccctgatgatcagcagaacccccgaggtgacctgcgtggtggtggatgtgagccacgaggaccctgaggtgaagttcaactggtacgtggacggcgtggaggtgcacaatgccaagaccaagcccagggaggagcagtacaacagcacctaccgggtggtgtccgtgctgaccgtgctgcaccaggattggctgaacggcaaggagtacaagtgcaaggtgtccaacaaggccctgcctgcccctatcgagaaaaccatcagcaaggccaagggccagcccagagagccccaggtgtacaccctgccccctagcagagatgagctgaccaagaaccaggtgtccctgacctgcctggtgaagggcttctaccccagcgacatcgccgtggagtgggagagcaacggccagcccgagaacaactacaagaccaccccccctgtgctggacagcgatggcagcttcttcctgtacagcaagctgaccgtggacaagagcagatggcagcagggcaacgtgttcagctgcagcgtgatgcacgaggccctgcacaatcactacacccagaagagcctgagcctgtcccctggcaagtga

SEQ ID NO: 153 - DNA, 1026 bp, Artificial Sequence
  Synthetic
gacatccagatgacccagagccccagcagcctgagcgcctctgtgggcgatagagtgaccatcacctgcagagccagccaggccatcgacagctacctgcactgggcccagcagaagcctggcaaggcccctaagctgctgatctacagcgccagcaatctggagaccggcgtgcctagcagattcagcggcagcggctccggcaccgacttcaccctgaccatcagcagcctgctgcctgaggatttcgccacctactactgccagcaggtggtgtggagacctttcaccttcggccagggcaccaaggtggagatcaagcgggtggagcccaagagcagcgataagacccacacctgccccccctgccctgcccccgagctgctgggcggacccagcgtgttcctgttcccccccaagcctaaggacaccctgatgatcagcagaacccccgaggtgacctgcgtggtggtggatgtgagccacgaggaccctgaggtgaagttcaactggtacgtggacggcgtggaggtgcacaatgccaagaccaagcccagggaggagcagtacaacagcacctaccgggtggtgtccgtgctgaccgtgctgcaccaggattggctgaacggcaaggagtacaagtgcaaggtgtccaacaaggccctgcctgcccctatcgagaaaaccatcagcaaggccaagggccagcccagagagccccaggtgtacaccctgccccctagcagagatgagctgaccaagaaccaggtgtccctgacctgcctggtgaagggcttctaccccagcgacatcgccgtggagtgggagagcaacggccagcccgagaacaactacaagaccaccccccctgtgctggacagcgatggcagcttcttcctgtacagcaagctgaccgtggacaagagcagatggcagcagggcaacgtgttcagctgcagcgtgatgcacgaggccctgcacaatcactacacccagaagagcctgagcctgtcccctggcaagtga

SEQ ID NO: 154 - DNA, 1026 bp, Artificial Sequence
  Synthetic
gacatccagatgacccagagccccagcagcctgagcgcctctgtgggcgatagagtgaccatcacctgcagagccagccaggccatcgacagctacctgcactggctgcagcagaagcctggcaaggcccctaagctgctgatctacagcgccagcaatctggagaccggcgtgcctagcagattcagcggcagcggctccggcaccgacttcaccctgaccatcagcagcctgctgcctgaggatttcgccacctactactgccagcaggtggtgtggagacctttcaccttcggccagggcaccaaggtggagatcaagcgggtggagcccaagagcagcgataagacccacacctgccccccctgccctgcccccgagctgctgggcggacccagcgtgttcctgttcccccccaagcctaaggacaccctgatgatcagcagaacccccgaggtgacctgcgtggtggtggatgtgagccacgaggaccctgaggtgaagttcaactggtacgtggacggcgtggaggtgcacaatgccaagaccaagcccagggaggagcagtacaacagcacctaccgggtggtgtccgtgctgaccgtgctgcaccaggattggctgaacggcaaggagtacaagtgcaaggtgtccaacaaggccctgcctgcccctatcgagaaaaccatcagcaaggccaagggccagcccagagagccccaggtgtacaccctgccccctagcagagatgagctgaccaagaaccaggtgtccctgacctgcctggtgaagggcttctaccccagcgacatcgccgtggagtgggagagcaacggccagcccgagaacaactacaagaccaccccccctgtgctggacagcgatggcagcttcttcctgtacagcaagctgaccgtggacaagagcagatggcagcagggcaacgtgttcagctgcagcgtgatgcacgaggccctgcacaatcactacacccagaagagcctgagcctgtcccctggcaagtga

SEQ ID NO: 155 - DNA, 1026 bp, Artificial Sequence
  Synthetic
gacatccagatgacccagagccccagcagcctgagcgcctctgtgggcgatagagtgaccatcacctgcagagccagccaggccatcgacagctacctgcactggtatgcccagaagcctggcaaggcccctaagctgctgatctacagcgccagcaatctggagaccggcgtgcctagcagattcagcggcagcggctccggcaccgacttcaccctgaccatcagcagcctgctgcctgaggatttcgccacctactactgccagcaggtggtgtggagacctttcaccttcggccagggcaccaaggtggagatcaagcgggtggagcccaagagcagcgataagacccacacctgccccccctgccctgcccccgagctgctgggcggacccagcgtgttcctgttcccccccaagcctaaggacaccctgatgatcagcagaacccccgaggtgacctgcgtggtggtggatgtgagccacgaggaccctgaggtgaagttcaactggtacgtggacggcgtggaggtgcacaatgccaagaccaagcccagggaggagcagtacaacagcacctaccgggtggtgtccgtgctgaccgtgctgcaccaggattggctgaacggcaaggagtacaagtgcaaggtgtccaacaaggccctgcctgcccctatcgagaaaaccatcagcaaggccaagggccagcccagagagccccaggtgtacaccctgccccctagcagagatgagctgaccaagaaccaggtgtccctgacctgcctggtgaagggcttctaccccagcgacatcgccgtggagtgggagagcaacggccagcccgagaacaactacaagaccaccccccctgtgctggacagcgatggcagcttcttcctgtacagcaagctgaccgtggacaagagcagatggcagcagggcaacgtgttcagctgcagcgtgatgcacgaggccctgcacaatcactacacccagaagagcctgagcctgtcccctggcaagtga

SEQ ID NO: 156 - DNA, 1026 bp, Artificial Sequence
  Synthetic
gacatccagatgacccagagccccagcagcctgagcgcctctgtgggcgatagagtgaccatcacctgcagagccagccaggccatcgacagctacctgcactggtatctgcagaagcctggcaaggcccctaagctgctgatctacagcgccagcaatctggagaccggcgtgcctagcagattcagcggcagcggctccggcaccgacttcaccctgaccatcagcagcctgctgcctgaggatttcgccacctactactgccagcaggtggtgtggagacctttcaccttcggccagggcaccaaggtggagatcaagcgggtggagcccaagagcagcgataagacccacacctgccccccctgccctgcccccgagctgctgggcggacccagcgtgttcctgttcccccccaagcctaaggacaccctgatgatcagcagaacccccgaggtgacctgcgtggtggtggatgtgagccacgaggaccctgaggtgaagttcaactggtacgtggacggcgtggaggtgcacaatgccaagaccaagcccagggaggagcagtacaacagcacctaccgggtggtgtccgtgctgaccgtgctgcaccaggattggctgaacggcaaggagtacaagtgcaaggtgtccaacaaggccctgcctgcccctatcgagaaaaccatcagcaaggccaagggccagcccagagagccccaggtgtacaccctgccccctagcagagatgagctgaccaagaaccaggtgtccctgacctgcctggtgaagggcttctaccccagcgacatcgccgtggagtgggagagcaacggccagcccgagaacaactacaagaccaccccccctgtgctggacagcgatggcagcttcttcctgtacagcaagctgaccgtggacaagagcagatggcagcagggcaacgtgttcagctgcagcgtgatgcacgaggccctgcacaatcactacacccagaagagcctgagcctgtcccctggcaagtga

SEQ ID NO: 157 - DNA, 1026 bp, Artificial Sequence
  Synthetic
gacatccagatgacccagagccccagcagcctgagcgcctctgtgggcgatagagtgaccatcacctgcagagccagccaggccatcgacagctacctgcactggtatcaggccaagcctggcaaggcccctaagctgctgatctacagcgccagcaatctggagaccggcgtgcctagcagattcagcggcagcggctccggcaccgacttcaccctgaccatcagcagcctgctgcctgaggatttcgccacctactactgccagcaggtggtgtggagacctttcaccttcggccagggcaccaaggtggagatcaagcgggtggagcccaagagcagcgataagacccacacctgccccccctgccctgcccccgagctgctgggcggacccagcgtgttcctgttcccccccaagcctaaggacaccctgatgatcagcagaacccccgaggtgacctgcgtggtggtggatgtgagccacgaggaccctgaggtgaagttcaactggtacgtggacggcgtggaggtgcacaatgccaagaccaagcccagggaggagcagtacaacagcacctaccgggtggtgtccgtgctgaccgtgctgcaccaggattggctgaacggcaaggagtacaagtgcaaggtgtccaacaaggccctgcctgcccctatcgagaaaaccatcagcaaggccaagggccagcccagagagccccaggtgtacaccctgccccctagcagagatgagctgaccaagaaccaggtgtccctgacctgcctggtgaagggcttctaccccagcgacatcgccgtggagtgggagagcaacggccagcccgagaacaactacaagaccaccccccctgtgctggacagcgatggcagcttcttcctgtacagcaagctgaccgtggacaagagcagatggcagcagggcaacgtgttcagctgcagcgtgatgcacgaggccctgcacaatcactacacccagaagagcctgagcctgtcccctggcaagtga

SEQ ID NO: 158 - DNA, 1026 bp, Artificial Sequence
  Synthetic
gacatccagatgacccagagccccagcagcctgagcgcctctgtgggcgatagagtgaccatcacctgcagagccagccaggccatcgacagctacctgcactggtatcagcaggcccctggcaaggcccctaagctgctgatctacagcgccagcaatctggagaccggcgtgcctagcagattcagcggcagcggctccggcaccgacttcaccctgaccatcagcagcctgctgcctgaggatttcgccacctactactgccagcaggtggtgtggagacctttcaccttcggccagggcaccaaggtggagatcaagcgggtggagcccaagagcagcgataagacccacacctgccccccctgccctgcccccgagctgctgggcggacccagcgtgttcctgttcccccccaagcctaaggacaccctgatgatcagcagaacccccgaggtgacctgcgtggtggtggatgtgagccacgaggaccctgaggtgaagttcaactggtacgtggacggcgtggaggtgcacaatgccaagaccaagcccagggaggagcagtacaacagcacctaccgggtggtgtccgtgctgaccgtgctgcaccaggattggctgaacggcaaggagtacaagtgcaaggtgtccaacaaggccctgcctgcccctatcgagaaaaccatcagcaaggccaagggccagcccagagagccccaggtgtacaccctgccccctagcagagatgagctgaccaagaaccaggtgtccctgacctgcctggtgaagggcttctaccccagcgacatcgccgtggagtgggagagcaacggccagcccgagaacaactacaagaccaccccccctgtgctggacagcgatggcagcttcttcctgtacagcaagctgaccgtggacaagagcagatggcagcagggcaacgtgttcagctgcagcgtgatgcacgaggccctgcacaatcactacacccagaagagcctgagcctgtcccctggcaagtga

SEQ ID NO: 159 - DNA, 1026 bp, Artificial Sequence
  Synthetic
gacatccagatgacccagagccccagcagcctgagcgcctctgtgggcgatagagtgaccatcacctgcagagccagccaggccatcgacagctacctgcactggtatcagcagaaggccggcaaggcccctaagctgctgatctacagcgccagcaatctggagaccggcgtgcctagcagattcagcggcagcggctccggcaccgacttcaccctgaccatcagcagcctgctgcctgaggatttcgccacctactactgccagcaggtggtgtggagacctttcaccttcggccagggcaccaaggtggagatcaagcgggtggagcccaagagcagcgataagacccacacctgccccccctgccctgcccccgagctgctgggcggacccagcgtgttcctgttcccccccaagcctaaggacaccctgatgatcagcagaacccccgaggtgacctgcgtggtggtggatgtgagccacgaggaccctgaggtgaagttcaactggtacgtggacggcgtggaggtgcacaatgccaagaccaagcccagggaggagcagtacaacagcacctaccgggtggtgtccgtgctgaccgtgctgcaccaggattggctgaacggcaaggagtacaagtgcaaggtgtccaacaaggccctgcctgcccctatcgagaaaaccatcagcaaggccaagggccagcccagagagccccaggtgtacaccctgccccctagcagagatgagctgaccaagaaccaggtgtccctgacctgcctggtgaagggcttctaccccagcgacatcgccgtggagtgggagagcaacggccagcccgagaacaactacaagaccaccccccctgtgctggacagcgatggcagcttcttcctgtacagcaagctgaccgtggacaagagcagatggcagcagggcaacgtgttcagctgcagcgtgatgcacgaggccctgcacaatcactacacccagaagagcctgagcctgtcccctggcaagtga

SEQ ID NO: 160 - DNA, 1026 bp, Artificial Sequence
  Synthetic
gacatccagatgacccagagccccagcagcctgagcgcctctgtgggcgatagagtgaccatcacctgcagagccagccaggccatcgacagctacctgcactggtatcagcagaagcctgacaaggcccctaagctgctgatctacagcgccagcaatctggagaccggcgtgcctagcagattcagcggcagcggctccggcaccgacttcaccctgaccatcagcagcctgctgcctgaggatttcgccacctactactgccagcaggtggtgtggagacctttcaccttcggccagggcaccaaggtggagatcaagcgggtggagcccaagagcagcgataagacccacacctgccccccctgccctgcccccgagctgctgggcggacccagcgtgttcctgttcccccccaagcctaaggacaccctgatgatcagcagaacccccgaggtgacctgcgtggtggtggatgtgagccacgaggaccctgaggtgaagttcaactggtacgtggacggcgtggaggtgcacaatgccaagaccaagcccagggaggagcagtacaacagcacctaccgggtggtgtccgtgctgaccgtgctgcaccaggattggctgaacggcaaggagtacaagtgcaaggtgtccaacaaggccctgcctgcccctatcgagaaaaccatcagcaaggccaagggccagcccagagagccccaggtgtacaccctgccccctagcagagatgagctgaccaagaaccaggtgtccctgacctgcctggtgaagggcttctaccccagcgacatcgccgtggagtgggagagcaacggccagcccgagaacaactacaagaccaccccccctgtgctggacagcgatggcagcttcttcctgtacagcaagctgaccgtggacaagagcagatggcagcagggcaacgtgttcagctgcagcgtgatgcacgaggccctgcacaatcactacacccagaagagcctgagcctgtcccctggcaagtga

SEQ ID NO: 161 - DNA, 1026 bp, Artificial Sequence
  Synthetic
gacatccagatgacccagagccccagcagcctgagcgcctctgtgggcgatagagtgaccatcacctgcagagccagccaggccatcgacagctacctgcactggtatcagcagaagcctggcgccgcccctaagctgctgatctacagcgccagcaatctggagaccggcgtgcctagcagattcagcggcagcggctccggcaccgacttcaccctgaccatcagcagcctgctgcctgaggatttcgccacctactactgccagcaggtggtgtggagacctttcaccttcggccagggcaccaaggtggagatcaagcgggtggagcccaagagcagcgataagacccacacctgccccccctgccctgcccccgagctgctgggcggacccagcgtgttcctgttcccccccaagcctaaggacaccctgatgatcagcagaacccccgaggtgacctgcgtggtggtggatgtgagccacgaggaccctgaggtgaagttcaactggtacgtggacggcgtggaggtgcacaatgccaagaccaagcccagggaggagcagtacaacagcacctaccgggtggtgtccgtgctgaccgtgctgcaccaggattggctgaacggcaaggagtacaagtgcaaggtgtccaacaaggccctgcctgcccctatcgagaaaaccatcagcaaggccaagggccagcccagagagccccaggtgtacaccctgccccctagcagagatgagctgaccaagaaccaggtgtccctgacctgcctggtgaagggcttctaccccagcgacatcgccgtggagtgggagagcaacggccagcccgagaacaactacaagaccaccccccctgtgctggacagcgatggcagcttcttcctgtacagcaagctgaccgtggacaagagcagatggcagcagggcaacgtgttcagctgcagcgtgatgcacgaggccctgcacaatcactacacccagaagagcctgagcctgtcccctggcaagtga

SEQ ID NO: 162 - DNA, 1026 bp, Artificial Sequence
  Synthetic
gacatccagatgacccagagccccagcagcctgagcgcctctgtgggcgatagagtgaccatcacctgcagagccagccaggccatcgacagctacctgcactggtatcagcagaagcctggcctggcccctaagctgctgatctacagcgccagcaatctggagaccggcgtgcctagcagattcagcggcagcggctccggcaccgacttcaccctgaccatcagcagcctgctgcctgaggatttcgccacctactactgccagcaggtggtgtggagacctttcaccttcggccagggcaccaaggtggagatcaagcgggtggagcccaagagcagcgataagacccacacctgccccccctgccctgcccccgagctgctgggcggacccagcgtgttcctgttcccccccaagcctaaggacaccctgatgatcagcagaacccccgaggtgacctgcgtggtggtggatgtgagccacgaggaccctgaggtgaagttcaactggtacgtggacggcgtggaggtgcacaatgccaagaccaagcccagggaggagcagtacaacagcacctaccgggtggtgtccgtgctgaccgtgctgcaccaggattggctgaacggcaaggagtacaagtgcaaggtgtccaacaaggccctgcctgcccctatcgagaaaaccatcagcaaggccaagggccagcccagagagccccaggtgtacaccctgccccctagcagagatgagctgaccaagaaccaggtgtccctgacctgcctggtgaagggcttctaccccagcgacatcgccgtggagtgggagagcaacggccagcccgagaacaactacaagaccaccccccctgtgctggacagcgatggcagcttcttcctgtacagcaagctgaccgtggacaagagcagatggcagcagggcaacgtgttcagctgcagcgtgatgcacgaggccctgcacaatcactacacccagaagagcctgagcctgtcccctggcaagtga

SEQ ID NO: 163 - DNA, 1026 bp, Artificial Sequence
  Synthetic
gacatccagatgacccagagccccagcagcctgagcgcctctgtgggcgatagagtgaccatcacctgcagagccagccaggccatcgacagctacctgcactggtatcagcagaagcctggccaggcccctaagctgctgatctacagcgccagcaatctggagaccggcgtgcctagcagattcagcggcagcggctccggcaccgacttcaccctgaccatcagcagcctgctgcctgaggatttcgccacctactactgccagcaggtggtgtggagacctttcaccttcggccagggcaccaaggtggagatcaagcgggtggagcccaagagcagcgataagacccacacctgccccccctgccctgcccccgagctgctgggcggacccagcgtgttcctgttcccccccaagcctaaggacaccctgatgatcagcagaacccccgaggtgacctgcgtggtggtggatgtgagccacgaggaccctgaggtgaagttcaactggtacgtggacggcgtggaggtgcacaatgccaagaccaagcccagggaggagcagtacaacagcacctaccgggtggtgtccgtgctgaccgtgctgcaccaggattggctgaacggcaaggagtacaagtgcaaggtgtccaacaaggccctgcctgcccctatcgagaaaaccatcagcaaggccaagggccagcccagagagccccaggtgtacaccctgccccctagcagagatgagctgaccaagaaccaggtgtccctgacctgcctggtgaagggcttctaccccagcgacatcgccgtggagtgggagagcaacggccagcccgagaacaactacaagaccaccccccctgtgctggacagcgatggcagcttcttcctgtacagcaagctgaccgtggacaagagcagatggcagcagggcaacgtgttcagctgcagcgtgatgcacgaggccctgcacaatcactacacccagaagagcctgagcctgtcccctggcaagtga

SEQ ID NO: 164 - DNA, 1026 bp, Artificial Sequence
  Synthetic
gacatccagatgacccagagccccagcagcctgagcgcctctgtgggcgatagagtgaccatcacctgcagagccagccaggccatcgacagctacctgcactggtatcagcagaagcctggcaagagccctaagctgctgatctacagcgccagcaatctggagaccggcgtgcctagcagattcagcggcagcggctccggcaccgacttcaccctgaccatcagcagcctgctgcctgaggatttcgccacctactactgccagcaggtggtgtggagacctttcaccttcggccagggcaccaaggtggagatcaagcgggtggagcccaagagcagcgataagacccacacctgccccccctgccctgcccccgagctgctgggcggacccagcgtgttcctgttcccccccaagcctaaggacaccctgatgatcagcagaacccccgaggtgacctgcgtggtggtggatgtgagccacgaggaccctgaggtgaagttcaactggtacgtggacggcgtggaggtgcacaatgccaagaccaagcccagggaggagcagtacaacagcacctaccgggtggtgtccgtgctgaccgtgctgcaccaggattggctgaacggcaaggagtacaagtgcaaggtgtccaacaaggccctgcctgcccctatcgagaaaaccatcagcaaggccaagggccagcccagagagccccaggtgtacaccctgccccctagcagagatgagctgaccaagaaccaggtgtccctgacctgcctggtgaagggcttctaccccagcgacatcgccgtggagtgggagagcaacggccagcccgagaacaactacaagaccaccccccctgtgctggacagcgatggcagcttcttcctgtacagcaagctgaccgtggacaagagcagatggcagcagggcaacgtgttcagctgcagcgtgatgcacgaggccctgcacaatcactacacccagaagagcctgagcctgtcccctggcaagtga

SEQ ID NO: 165 - DNA, 1026 bp, Artificial Sequence
  Synthetic
gacatccagatgacccagagccccagcagcctgagcgcctctgtgggcgatagagtgaccatcacctgcagagccagccaggccatcgacagctacctgcactggtatcagcagaagcctggcaagccccctaagctgctgatctacagcgccagcaatctggagaccggcgtgcctagcagattcagcggcagcggctccggcaccgacttcaccctgaccatcagcagcctgctgcctgaggatttcgccacctactactgccagcaggtggtgtggagacctttcaccttcggccagggcaccaaggtggagatcaagcgggtggagcccaagagcagcgataagacccacacctgccccccctgccctgcccccgagctgctgggcggacccagcgtgttcctgttcccccccaagcctaaggacaccctgatgatcagcagaacccccgaggtgacctgcgtggtggtggatgtgagccacgaggaccctgaggtgaagttcaactggtacgtggacggcgtggaggtgcacaatgccaagaccaagcccagggaggagcagtacaacagcacctaccgggtggtgtccgtgctgaccgtgctgcaccaggattggctgaacggcaaggagtacaagtgcaaggtgtccaacaaggccctgcctgcccctatcgagaaaaccatcagcaaggccaagggccagcccagagagccccaggtgtacaccctgccccctagcagagatgagctgaccaagaaccaggtgtccctgacctgcctggtgaagggcttctaccccagcgacatcgccgtggagtgggagagcaacggccagcccgagaacaactacaagaccaccccccctgtgctggacagcgatggcagcttcttcctgtacagcaagctgaccgtggacaagagcagatggcagcagggcaacgtgttcagctgcagcgtgatgcacgaggccctgcacaatcactacacccagaagagcctgagcctgtcccctggcaagtga

SEQ ID NO: 166 - DNA, 1026 bp, Artificial Sequence
  Synthetic
gacatccagatgacccagagccccagcagcctgagcgcctctgtgggcgatagagtgaccatcacctgcagagccagccaggccatcgacagctacctgcactggtatcagcagaagcctggcaaggccgccaagctgctgatctacagcgccagcaatctggagaccggcgtgcctagcagattcagcggcagcggctccggcaccgacttcaccctgaccatcagcagcctgctgcctgaggatttcgccacctactactgccagcaggtggtgtggagacctttcaccttcggccagggcaccaaggtggagatcaagcgggtggagcccaagagcagcgataagacccacacctgccccccctgccctgcccccgagctgctgggcggacccagcgtgttcctgttcccccccaagcctaaggacaccctgatgatcagcagaacccccgaggtgacctgcgtggtggtggatgtgagccacgaggaccctgaggtgaagttcaactggtacgtggacggcgtggaggtgcacaatgccaagaccaagcccagggaggagcagtacaacagcacctaccgggtggtgtccgtgctgaccgtgctgcaccaggattggctgaacggcaaggagtacaagtgcaaggtgtccaacaaggccctgcctgcccctatcgagaaaaccatcagcaaggccaagggccagcccagagagccccaggtgtacaccctgccccctagcagagatgagctgaccaagaaccaggtgtccctgacctgcctggtgaagggcttctaccccagcgacatcgccgtggagtgggagagcaacggccagcccgagaacaactacaagaccaccccccctgtgctggacagcgatggcagcttcttcctgtacagcaagctgaccgtggacaagagcagatggcagcagggcaacgtgttcagctgcagcgtgatgcacgaggccctgcacaatcactacacccagaagagcctgagcctgtcccctggcaagtga

SEQ ID NO: 167 - DNA, 1026 bp, Artificial Sequence
  Synthetic
gacatccagatgacccagagccccagcagcctgagcgcctctgtgggcgatagagtgaccatcacctgcagagccagccaggccatcgacagctacctgcactggtatcagcagaagcctggcaaggcccctaagctgctgatctacagcgccagcaatctggagaccggcgtgcctagcagagccagcggcagcggctccggcaccgacttcaccctgaccatcagcagcctgctgcctgaggatttcgccacctactactgccagcaggtggtgtggagacctttcaccttcggccagggcaccaaggtggagatcaagcgggtggagcccaagagcagcgataagacccacacctgccccccctgccctgcccccgagctgctgggcggacccagcgtgttcctgttcccccccaagcctaaggacaccctgatgatcagcagaacccccgaggtgacctgcgtggtggtggatgtgagccacgaggaccctgaggtgaagttcaactggtacgtggacggcgtggaggtgcacaatgccaagaccaagcccagggaggagcagtacaacagcacctaccgggtggtgtccgtgctgaccgtgctgcaccaggattggctgaacggcaaggagtacaagtgcaaggtgtccaacaaggccctgcctgcccctatcgagaaaaccatcagcaaggccaagggccagcccagagagccccaggtgtacaccctgccccctagcagagatgagctgaccaagaaccaggtgtccctgacctgcctggtgaagggcttctaccccagcgacatcgccgtggagtgggagagcaacggccagcccgagaacaactacaagaccaccccccctgtgctggacagcgatggcagcttcttcctgtacagcaagctgaccgtggacaagagcagatggcagcagggcaacgtgttcagctgcagcgtgatgcacgaggccctgcacaatcactacacccagaagagcctgagcctgtcccctggcaagtga

SEQ ID NO: 168 - DNA, 1026 bp, Artificial Sequence
  Synthetic
gacatccagatgacccagagccccagcagcctgagcgcctctgtgggcgatagagtgaccatcacctgcagagccagccaggccatcgacagctacctgcactggtatcagcagaagcctggcaaggcccctaagctgctgatctacagcgccagcaatctggagaccggcgtgcctagcagattcgccggcagcggctccggcaccgacttcaccctgaccatcagcagcctgctgcctgaggatttcgccacctactactgccagcaggtggtgtggagacctttcaccttcggccagggcaccaaggtggagatcaagcgggtggagcccaagagcagcgataagacccacacctgccccccctgccctgcccccgagctgctgggcggacccagcgtgttcctgttcccccccaagcctaaggacaccctgatgatcagcagaacccccgaggtgacctgcgtggtggtggatgtgagccacgaggaccctgaggtgaagttcaactggtacgtggacggcgtggaggtgcacaatgccaagaccaagcccagggaggagcagtacaacagcacctaccgggtggtgtccgtgctgaccgtgctgcaccaggattggctgaacggcaaggagtacaagtgcaaggtgtccaacaaggccctgcctgcccctatcgagaaaaccatcagcaaggccaagggccagcccagagagccccaggtgtacaccctgccccctagcagagatgagctgaccaagaaccaggtgtccctgacctgcctggtgaagggcttctaccccagcgacatcgccgtggagtgggagagcaacggccagcccgagaacaactacaagaccaccccccctgtgctggacagcgatggcagcttcttcctgtacagcaagctgaccgtggacaagagcagatggcagcagggcaacgtgttcagctgcagcgtgatgcacgaggccctgcacaatcactacacccagaagagcctgagcctgtcccctggcaagtga

SEQ ID NO: 169 - DNA, 1026 bp, Artificial Sequence
  Synthetic
gacatccagatgacccagagccccagcagcctgagcgcctctgtgggcgatagagtgaccatcacctgcagagccagccaggccatcgacagctacctgcactggtatcagcagaagcctggcaaggcccctaagctgctgatctacagcgccagcaatctggagaccggcgtgcctagcagattctacggcagcggctccggcaccgacttcaccctgaccatcagcagcctgctgcctgaggatttcgccacctactactgccagcaggtggtgtggagacctttcaccttcggccagggcaccaaggtggagatcaagcgggtggagcccaagagcagcgataagacccacacctgccccccctgccctgcccccgagctgctgggcggacccagcgtgttcctgttcccccccaagcctaaggacaccctgatgatcagcagaacccccgaggtgacctgcgtggtggtggatgtgagccacgaggaccctgaggtgaagttcaactggtacgtggacggcgtggaggtgcacaatgccaagaccaagcccagggaggagcagtacaacagcacctaccgggtggtgtccgtgctgaccgtgctgcaccaggattggctgaacggcaaggagtacaagtgcaaggtgtccaacaaggccctgcctgcccctatcgagaaaaccatcagcaaggccaagggccagcccagagagccccaggtgtacaccctgccccctagcagagatgagctgaccaagaaccaggtgtccctgacctgcctggtgaagggcttctaccccagcgacatcgccgtggagtgggagagcaacggccagcccgagaacaactacaagaccaccccccctgtgctggacagcgatggcagcttcttcctgtacagcaagctgaccgtggacaagagcagatggcagcagggcaacgtgttcagctgcagcgtgatgcacgaggccctgcacaatcactacacccagaagagcctgagcctgtcccctggcaagtga

SEQ ID NO: 170 - DNA, 1026 bp, Artificial Sequence
  Synthetic
gacatccagatgacccagagccccagcagcctgagcgcctctgtgggcgatagagtgaccatcacctgcagagccagccaggccatcgacagctacctgcactggtatcagcagaagcctggcaaggcccctaagctgctgatctacagcgccagcaatctggagaccggcgtgcctagcagattcagctacagcggctccggcaccgacttcaccctgaccatcagcagcctgctgcctgaggatttcgccacctactactgccagcaggtggtgtggagacctttcaccttcggccagggcaccaaggtggagatcaagcgggtggagcccaagagcagcgataagacccacacctgccccccctgccctgcccccgagctgctgggcggacccagcgtgttcctgttcccccccaagcctaaggacaccctgatgatcagcagaacccccgaggtgacctgcgtggtggtggatgtgagccacgaggaccctgaggtgaagttcaactggtacgtggacggcgtggaggtgcacaatgccaagaccaagcccagggaggagcagtacaacagcacctaccgggtggtgtccgtgctgaccgtgctgcaccaggattggctgaacggcaaggagtacaagtgcaaggtgtccaacaaggccctgcctgcccctatcgagaaaaccatcagcaaggccaagggccagcccagagagccccaggtgtacaccctgccccctagcagagatgagctgaccaagaaccaggtgtccctgacctgcctggtgaagggcttctaccccagcgacatcgccgtggagtgggagagcaacggccagcccgagaacaactacaagaccaccccccctgtgctggacagcgatggcagcttcttcctgtacagcaagctgaccgtggacaagagcagatggcagcagggcaacgtgttcagctgcagcgtgatgcacgaggccctgcacaatcactacacccagaagagcctgagcctgtcccctggcaagtga

SEQ ID NO: 171 - DNA, 1026 bp, Artificial Sequence
  Synthetic
gacatccagatgacccagagccccagcagcctgagcgcctctgtgggcgatagagtgaccatcacctgcagagccagccaggccatcgacagctacctgcactggtatcagcagaagcctggcaaggcccctaagctgctgatctacagcgccagcaatctggagaccggcgtgcctagcagattcagcggcgccggctccggcaccgacttcaccctgaccatcagcagcctgctgcctgaggatttcgccacctactactgccagcaggtggtgtggagacctttcaccttcggccagggcaccaaggtggagatcaagcgggtggagcccaagagcagcgataagacccacacctgccccccctgccctgcccccgagctgctgggcggacccagcgtgttcctgttcccccccaagcctaaggacaccctgatgatcagcagaacccccgaggtgacctgcgtggtggtggatgtgagccacgaggaccctgaggtgaagttcaactggtacgtggacggcgtggaggtgcacaatgccaagaccaagcccagggaggagcagtacaacagcacctaccgggtggtgtccgtgctgaccgtgctgcaccaggattggctgaacggcaaggagtacaagtgcaaggtgtccaacaaggccctgcctgcccctatcgagaaaaccatcagcaaggccaagggccagcccagagagccccaggtgtacaccctgccccctagcagagatgagctgaccaagaaccaggtgtccctgacctgcctggtgaagggcttctaccccagcgacatcgccgtggagtgggagagcaacggccagcccgagaacaactacaagaccaccccccctgtgctggacagcgatggcagcttcttcctgtacagcaagctgaccgtggacaagagcagatggcagcagggcaacgtgttcagctgcagcgtgatgcacgaggccctgcacaatcactacacccagaagagcctgagcctgtcccctggcaagtga

SEQ ID NO: 172 - DNA, 1026 bp, Artificial Sequence
  Synthetic
gacatccagatgacccagagccccagcagcctgagcgcctctgtgggcgatagagtgaccatcacctgcagagccagccaggccatcgacagctacctgcactggtatcagcagaagcctggcaaggcccctaagctgctgatctacagcgccagcaatctggagaccggcgtgcctagcagattcagcggcagcggcgccggcaccgacttcaccctgaccatcagcagcctgctgcctgaggatttcgccacctactactgccagcaggtggtgtggagacctttcaccttcggccagggcaccaaggtggagatcaagcgggtggagcccaagagcagcgataagacccacacctgccccccctgccctgcccccgagctgctgggcggacccagcgtgttcctgttcccccccaagcctaaggacaccctgatgatcagcagaacccccgaggtgacctgcgtggtggtggatgtgagccacgaggaccctgaggtgaagttcaactggtacgtggacggcgtggaggtgcacaatgccaagaccaagcccagggaggagcagtacaacagcacctaccgggtggtgtccgtgctgaccgtgctgcaccaggattggctgaacggcaaggagtacaagtgcaaggtgtccaacaaggccctgcctgcccctatcgagaaaaccatcagcaaggccaagggccagcccagagagccccaggtgtacaccctgccccctagcagagatgagctgaccaagaaccaggtgtccctgacctgcctggtgaagggcttctaccccagcgacatcgccgtggagtgggagagcaacggccagcccgagaacaactacaagaccaccccccctgtgctggacagcgatggcagcttcttcctgtacagcaagctgaccgtggacaagagcagatggcagcagggcaacgtgttcagctgcagcgtgatgcacgaggccctgcacaatcactacacccagaagagcctgagcctgtcccctggcaagtga

SEQ ID NO: 173 - DNA, 1026 bp, Artificial Sequence
  Synthetic
gacatccagatgacccagagccccagcagcctgagcgcctctgtgggcgatagagtgaccatcacctgcagagccagccaggccatcgacagctacctgcactggtatcagcagaagcctggcaaggcccctaagctgctgatctacagcgccagcaatctggagaccggcgtgcctagcagattcagcggcagcggctacggcaccgacttcaccctgaccatcagcagcctgctgcctgaggatttcgccacctactactgccagcaggtggtgtggagacctttcaccttcggccagggcaccaaggtggagatcaagcgggtggagcccaagagcagcgataagacccacacctgccccccctgccctgcccccgagctgctgggcggacccagcgtgttcctgttcccccccaagcctaaggacaccctgatgatcagcagaacccccgaggtgacctgcgtggtggtggatgtgagccacgaggaccctgaggtgaagttcaactggtacgtggacggcgtggaggtgcacaatgccaagaccaagcccagggaggagcagtacaacagcacctaccgggtggtgtccgtgctgaccgtgctgcaccaggattggctgaacggcaaggagtacaagtgcaaggtgtccaacaaggccctgcctgcccctatcgagaaaaccatcagcaaggccaagggccagcccagagagccccaggtgtacaccctgccccctagcagagatgagctgaccaagaaccaggtgtccctgacctgcctggtgaagggcttctaccccagcgacatcgccgtggagtgggagagcaacggccagcccgagaacaactacaagaccaccccccctgtgctggacagcgatggcagcttcttcctgtacagcaagctgaccgtggacaagagcagatggcagcagggcaacgtgttcagctgcagcgtgatgcacgaggccctgcacaatcactacacccagaagagcctgagcctgtcccctggcaagtga

SEQ ID NO: 174 - DNA, 1026 bp, Artificial Sequence
  Synthetic
gacatccagatgacccagagccccagcagcctgagcgcctctgtgggcgatagagtgaccatcacctgcagagccagccaggccatcgacagctacctgcactggtatcagcagaagcctggcaaggcccctaagctgctgatctacagcgccagcaatctggagaccggcgtgcctagcagattcagcggcagcggccccggcaccgacttcaccctgaccatcagcagcctgctgcctgaggatttcgccacctactactgccagcaggtggtgtggagacctttcaccttcggccagggcaccaaggtggagatcaagcgggtggagcccaagagcagcgataagacccacacctgccccccctgccctgcccccgagctgctgggcggacccagcgtgttcctgttcccccccaagcctaaggacaccctgatgatcagcagaacccccgaggtgacctgcgtggtggtggatgtgagccacgaggaccctgaggtgaagttcaactggtacgtggacggcgtggaggtgcacaatgccaagaccaagcccagggaggagcagtacaacagcacctaccgggtggtgtccgtgctgaccgtgctgcaccaggattggctgaacggcaaggagtacaagtgcaaggtgtccaacaaggccctgcctgcccctatcgagaaaaccatcagcaaggccaagggccagcccagagagccccaggtgtacaccctgccccctagcagagatgagctgaccaagaaccaggtgtccctgacctgcctggtgaagggcttctaccccagcgacatcgccgtggagtgggagagcaacggccagcccgagaacaactacaagaccaccccccctgtgctggacagcgatggcagcttcttcctgtacagcaagctgaccgtggacaagagcagatggcagcagggcaacgtgttcagctgcagcgtgatgcacgaggccctgcacaatcactacacccagaagagcctgagcctgtcccctggcaagtga

SEQ ID NO: 175 - DNA, 1026 bp, Artificial Sequence
  Synthetic
gacatccagatgacccagagccccagcagcctgagcgcctctgtgggcgatagagtgaccatcacctgcagagccagccaggccatcgacagctacctgcactggtatcagcagaagcctggcaaggcccctaagctgctgatctacagcgccagcaatctggagaccggcgtgcctagcagattcagcggcagcggctccggcgccgacttcaccctgaccatcagcagcctgctgcctgaggatttcgccacctactactgccagcaggtggtgtggagacctttcaccttcggccagggcaccaaggtggagatcaagcgggtggagcccaagagcagcgataagacccacacctgccccccctgccctgcccccgagctgctgggcggacccagcgtgttcctgttcccccccaagcctaaggacaccctgatgatcagcagaacccccgaggtgacctgcgtggtggtggatgtgagccacgaggaccctgaggtgaagttcaactggtacgtggacggcgtggaggtgcacaatgccaagaccaagcccagggaggagcagtacaacagcacctaccgggtggtgtccgtgctgaccgtgctgcaccaggattggctgaacggcaaggagtacaagtgcaaggtgtccaacaaggccctgcctgcccctatcgagaaaaccatcagcaaggccaagggccagcccagagagccccaggtgtacaccctgccccctagcagagatgagctgaccaagaaccaggtgtccctgacctgcctggtgaagggcttctaccccagcgacatcgccgtggagtgggagagcaacggccagcccgagaacaactacaagaccaccccccctgtgctggacagcgatggcagcttcttcctgtacagcaagctgaccgtggacaagagcagatggcagcagggcaacgtgttcagctgcagcgtgatgcacgaggccctgcacaatcactacacccagaagagcctgagcctgtcccctggcaagtga

SEQ ID NO: 176 - DNA, 1026 bp, Artificial Sequence
  Synthetic
gacatccagatgacccagagccccagcagcctgagcgcctctgtgggcgatagagtgaccatcacctgcagagccagccaggccatcgacagctacctgcactggtatcagcagaagcctggcaaggcccctaagctgctgatctacagcgccagcaatctggagaccggcgtgcctagcagattcagcggcagcggctccggcaccgccttcaccctgaccatcagcagcctgctgcctgaggatttcgccacctactactgccagcaggtggtgtggagacctttcaccttcggccagggcaccaaggtggagatcaagcgggtggagcccaagagcagcgataagacccacacctgccccccctgccctgcccccgagctgctgggcggacccagcgtgttcctgttcccccccaagcctaaggacaccctgatgatcagcagaacccccgaggtgacctgcgtggtggtggatgtgagccacgaggaccctgaggtgaagttcaactggtacgtggacggcgtggaggtgcacaatgccaagaccaagcccagggaggagcagtacaacagcacctaccgggtggtgtccgtgctgaccgtgctgcaccaggattggctgaacggcaaggagtacaagtgcaaggtgtccaacaaggccctgcctgcccctatcgagaaaaccatcagcaaggccaagggccagcccagagagccccaggtgtacaccctgccccctagcagagatgagctgaccaagaaccaggtgtccctgacctgcctggtgaagggcttctaccccagcgacatcgccgtggagtgggagagcaacggccagcccgagaacaactacaagaccaccccccctgtgctggacagcgatggcagcttcttcctgtacagcaagctgaccgtggacaagagcagatggcagcagggcaacgtgttcagctgcagcgtgatgcacgaggccctgcacaatcactacacccagaagagcctgagcctgtcccctggcaagtga

SEQ ID NO: 177 - DNA, 1026 bp, Artificial Sequence
  Synthetic
gacatccagatgacccagagccccagcagcctgagcgcctctgtgggcgatagagtgaccatcacctgcagagccagccaggccatcgacagctacctgcactggtatcagcagaagcctggcaaggcccctaagctgctgatctacagcgccagcaatctggagaccggcgtgcctagcagattcagcggcagcggctccggcaccgacgccaccctgaccatcagcagcctgctgcctgaggatttcgccacctactactgccagcaggtggtgtggagacctttcaccttcggccagggcaccaaggtggagatcaagcgggtggagcccaagagcagcgataagacccacacctgccccccctgccctgcccccgagctgctgggcggacccagcgtgttcctgttcccccccaagcctaaggacaccctgatgatcagcagaacccccgaggtgacctgcgtggtggtggatgtgagccacgaggaccctgaggtgaagttcaactggtacgtggacggcgtggaggtgcacaatgccaagaccaagcccagggaggagcagtacaacagcacctaccgggtggtgtccgtgctgaccgtgctgcaccaggattggctgaacggcaaggagtacaagtgcaaggtgtccaacaaggccctgcctgcccctatcgagaaaaccatcagcaaggccaagggccagcccagagagccccaggtgtacaccctgccccctagcagagatgagctgaccaagaaccaggtgtccctgacctgcctggtgaagggcttctaccccagcgacatcgccgtggagtgggagagcaacggccagcccgagaacaactacaagaccaccccccctgtgctggacagcgatggcagcttcttcctgtacagcaagctgaccgtggacaagagcagatggcagcagggcaacgtgttcagctgcagcgtgatgcacgaggccctgcacaatcactacacccagaagagcctgagcctgtcccctggcaagtga

SEQ ID NO: 178 - DNA, 1026 bp, Artificial Sequence
  Synthetic
gacatccagatgacccagagccccagcagcctgagcgcctctgtgggcgatagagtgaccatcacctgcagagccagccaggccatcgacagctacctgcactggtatcagcagaagcctggcaaggcccctaagctgctgatctacagcgccagcaatctggagaccggcgtgcctagcagattcagcggcagcggctccggcaccgacttcgccctgaccatcagcagcctgctgcctgaggatttcgccacctactactgccagcaggtggtgtggagacctttcaccttcggccagggcaccaaggtggagatcaagcgggtggagcccaagagcagcgataagacccacacctgccccccctgccctgcccccgagctgctgggcggacccagcgtgttcctgttcccccccaagcctaaggacaccctgatgatcagcagaacccccgaggtgacctgcgtggtggtggatgtgagccacgaggaccctgaggtgaagttcaactggtacgtggacggcgtggaggtgcacaatgccaagaccaagcccagggaggagcagtacaacagcacctaccgggtggtgtccgtgctgaccgtgctgcaccaggattggctgaacggcaaggagtacaagtgcaaggtgtccaacaaggccctgcctgcccctatcgagaaaaccatcagcaaggccaagggccagcccagagagccccaggtgtacaccctgccccctagcagagatgagctgaccaagaaccaggtgtccctgacctgcctggtgaagggcttctaccccagcgacatcgccgtggagtgggagagcaacggccagcccgagaacaactacaagaccaccccccctgtgctggacagcgatggcagcttcttcctgtacagcaagctgaccgtggacaagagcagatggcagcagggcaacgtgttcagctgcagcgtgatgcacgaggccctgcacaatcactacacccagaagagcctgagcctgtcccctggcaagtga

SEQ ID NO: 179 - DNA, 1026 bp, Artificial Sequence
  Synthetic
gacatccagatgacccagagccccagcagcctgagcgcctctgtgggcgatagagtgaccatcacctgcagagccagccaggccatcgacagctacctgcactggtatcagcagaagcctggcaaggcccctaagctgctgatctacagcgccagcaatctggagaccggcgtgcctagcagattcagcggcagcggctccggcaccgacttcaccgccaccatcagcagcctgctgcctgaggatttcgccacctactactgccagcaggtggtgtggagacctttcaccttcggccagggcaccaaggtggagatcaagcgggtggagcccaagagcagcgataagacccacacctgccccccctgccctgcccccgagctgctgggcggacccagcgtgttcctgttcccccccaagcctaaggacaccctgatgatcagcagaacccccgaggtgacctgcgtggtggtggatgtgagccacgaggaccctgaggtgaagttcaactggtacgtggacggcgtggaggtgcacaatgccaagaccaagcccagggaggagcagtacaacagcacctaccgggtggtgtccgtgctgaccgtgctgcaccaggattggctgaacggcaaggagtacaagtgcaaggtgtccaacaaggccctgcctgcccctatcgagaaaaccatcagcaaggccaagggccagcccagagagccccaggtgtacaccctgccccctagcagagatgagctgaccaagaaccaggtgtccctgacctgcctggtgaagggcttctaccccagcgacatcgccgtggagtgggagagcaacggccagcccgagaacaactacaagaccaccccccctgtgctggacagcgatggcagcttcttcctgtacagcaagctgaccgtggacaagagcagatggcagcagggcaacgtgttcagctgcagcgtgatgcacgaggccctgcacaatcactacacccagaagagcctgagcctgtcccctggcaagtga

SEQ ID NO: 180 - DNA, 1026 bp, Artificial Sequence
  Synthetic
gacatccagatgacccagagccccagcagcctgagcgcctctgtgggcgatagagtgaccatcacctgcagagccagccaggccatcgacagctacctgcactggtatcagcagaagcctggcaaggcccctaagctgctgatctacagcgccagcaatctggagaccggcgtgcctagcagattcagcggcagcggctccggcaccgacttcaccctggccatcagcagcctgctgcctgaggatttcgccacctactactgccagcaggtggtgtggagacctttcaccttcggccagggcaccaaggtggagatcaagcgggtggagcccaagagcagcgataagacccacacctgccccccctgccctgcccccgagctgctgggcggacccagcgtgttcctgttcccccccaagcctaaggacaccctgatgatcagcagaacccccgaggtgacctgcgtggtggtggatgtgagccacgaggaccctgaggtgaagttcaactggtacgtggacggcgtggaggtgcacaatgccaagaccaagcccagggaggagcagtacaacagcacctaccgggtggtgtccgtgctgaccgtgctgcaccaggattggctgaacggcaaggagtacaagtgcaaggtgtccaacaaggccctgcctgcccctatcgagaaaaccatcagcaaggccaagggccagcccagagagccccaggtgtacaccctgccccctagcagagatgagctgaccaagaaccaggtgtccctgacctgcctggtgaagggcttctaccccagcgacatcgccgtggagtgggagagcaacggccagcccgagaacaactacaagaccaccccccctgtgctggacagcgatggcagcttcttcctgtacagcaagctgaccgtggacaagagcagatggcagcagggcaacgtgttcagctgcagcgtgatgcacgaggccctgcacaatcactacacccagaagagcctgagcctgtcccctggcaagtga

SEQ ID NO: 181 - DNA, 1026 bp, Artificial Sequence
  Synthetic
gacatccagatgacccagagccccagcagcctgagcgcctctgtgggcgatagagtgaccatcacctgcagagccagccaggccatcgacagctacctgcactggtatcagcagaagcctggcaaggcccctaagctgctgatctacagcgccagcaatctggagaccggcgtgcctagcagattcagcggcagcggctccggcaccgacttcaccctgaagatcagcagcctgctgcctgaggatttcgccacctactactgccagcaggtggtgtggagacctttcaccttcggccagggcaccaaggtggagatcaagcgggtggagcccaagagcagcgataagacccacacctgccccccctgccctgcccccgagctgctgggcggacccagcgtgttcctgttcccccccaagcctaaggacaccctgatgatcagcagaacccccgaggtgacctgcgtggtggtggatgtgagccacgaggaccctgaggtgaagttcaactggtacgtggacggcgtggaggtgcacaatgccaagaccaagcccagggaggagcagtacaacagcacctaccgggtggtgtccgtgctgaccgtgctgcaccaggattggctgaacggcaaggagtacaagtgcaaggtgtccaacaaggccctgcctgcccctatcgagaaaaccatcagcaaggccaagggccagcccagagagccccaggtgtacaccctgccccctagcagagatgagctgaccaagaaccaggtgtccctgacctgcctggtgaagggcttctaccccagcgacatcgccgtggagtgggagagcaacggccagcccgagaacaactacaagaccaccccccctgtgctggacagcgatggcagcttcttcctgtacagcaagctgaccgtggacaagagcagatggcagcagggcaacgtgttcagctgcagcgtgatgcacgaggccctgcacaatcactacacccagaagagcctgagcctgtcccctggcaagtga

SEQ ID NO: 182 - DNA, 1026 bp, Artificial Sequence
  Synthetic
gacatccagatgacccagagccccagcagcctgagcgcctctgtgggcgatagagtgaccatcacctgcagagccagccaggccatcgacagctacctgcactggtatcagcagaagcctggcaaggcccctaagctgctgatctacagcgccagcaatctggagaccggcgtgcctagcagattcagcggcagcggctccggcaccgacttcaccctgaccgccagcagcctgctgcctgaggatttcgccacctactactgccagcaggtggtgtggagacctttcaccttcggccagggcaccaaggtggagatcaagcgggtggagcccaagagcagcgataagacccacacctgccccccctgccctgcccccgagctgctgggcggacccagcgtgttcctgttcccccccaagcctaaggacaccctgatgatcagcagaacccccgaggtgacctgcgtggtggtggatgtgagccacgaggaccctgaggtgaagttcaactggtacgtggacggcgtggaggtgcacaatgccaagaccaagcccagggaggagcagtacaacagcacctaccgggtggtgtccgtgctgaccgtgctgcaccaggattggctgaacggcaaggagtacaagtgcaaggtgtccaacaaggccctgcctgcccctatcgagaaaaccatcagcaaggccaagggccagcccagagagccccaggtgtacaccctgccccctagcagagatgagctgaccaagaaccaggtgtccctgacctgcctggtgaagggcttctaccccagcgacatcgccgtggagtgggagagcaacggccagcccgagaacaactacaagaccaccccccctgtgctggacagcgatggcagcttcttcctgtacagcaagctgaccgtggacaagagcagatggcagcagggcaacgtgttcagctgcagcgtgatgcacgaggccctgcacaatcactacacccagaagagcctgagcctgtcccctggcaagtga

SEQ ID NO: 183 - DNA, 1026 bp, Artificial Sequence
  Synthetic
gacatccagatgacccagagccccagcagcctgagcgcctctgtgggcgatagagtgaccatcacctgcagagccagccaggccatcgacagctacctgcactggtatcagcagaagcctggcaaggcccctaagctgctgatctacagcgccagcaatctggagaccggcgtgcctagcagattcagcggcagcggctccggcaccgacttcaccctgaccatcgccagcctgctgcctgaggatttcgccacctactactgccagcaggtggtgtggagacctttcaccttcggccagggcaccaaggtggagatcaagcgggtggagcccaagagcagcgataagacccacacctgccccccctgccctgcccccgagctgctgggcggacccagcgtgttcctgttcccccccaagcctaaggacaccctgatgatcagcagaacccccgaggtgacctgcgtggtggtggatgtgagccacgaggaccctgaggtgaagttcaactggtacgtggacggcgtggaggtgcacaatgccaagaccaagcccagggaggagcagtacaacagcacctaccgggtggtgtccgtgctgaccgtgctgcaccaggattggctgaacggcaaggagtacaagtgcaaggtgtccaacaaggccctgcctgcccctatcgagaaaaccatcagcaaggccaagggccagcccagagagccccaggtgtacaccctgccccctagcagagatgagctgaccaagaaccaggtgtccctgacctgcctggtgaagggcttctaccccagcgacatcgccgtggagtgggagagcaacggccagcccgagaacaactacaagaccaccccccctgtgctggacagcgatggcagcttcttcctgtacagcaagctgaccgtggacaagagcagatggcagcagggcaacgtgttcagctgcagcgtgatgcacgaggccctgcacaatcactacacccagaagagcctgagcctgtcccctggcaagtga

SEQ ID NO: 184 - DNA, 1026 bp, Artificial Sequence
  Synthetic
gacatccagatgacccagagccccagcagcctgagcgcctctgtgggcgatagagtgaccatcacctgcagagccagccaggccatcgacagctacctgcactggtatcagcagaagcctggcaaggcccctaagctgctgatctacagcgccagcaatctggagaccggcgtgcctagcagattcagcggcagcggctccggcaccgacttcaccctgaccatcagcgccctgctgcctgaggatttcgccacctactactgccagcaggtggtgtggagacctttcaccttcggccagggcaccaaggtggagatcaagcgggtggagcccaagagcagcgataagacccacacctgccccccctgccctgcccccgagctgctgggcggacccagcgtgttcctgttcccccccaagcctaaggacaccctgatgatcagcagaacccccgaggtgacctgcgtggtggtggatgtgagccacgaggaccctgaggtgaagttcaactggtacgtggacggcgtggaggtgcacaatgccaagaccaagcccagggaggagcagtacaacagcacctaccgggtggtgtccgtgctgaccgtgctgcaccaggattggctgaacggcaaggagtacaagtgcaaggtgtccaacaaggccctgcctgcccctatcgagaaaaccatcagcaaggccaagggccagcccagagagccccaggtgtacaccctgccccctagcagagatgagctgaccaagaaccaggtgtccctgacctgcctggtgaagggcttctaccccagcgacatcgccgtggagtgggagagcaacggccagcccgagaacaactacaagaccaccccccctgtgctggacagcgatggcagcttcttcctgtacagcaagctgaccgtggacaagagcagatggcagcagggcaacgtgttcagctgcagcgtgatgcacgaggccctgcacaatcactacacccagaagagcctgagcctgtcccctggcaagtga

SEQ ID NO: 185 - DNA, 1026 bp, Artificial Sequence
  Synthetic
gacatccagatgacccagagccccagcagcctgagcgcctctgtgggcgatagagtgaccatcacctgcagagccagccaggccatcgacagctacctgcactggtatcagcagaagcctggcaaggcccctaagctgctgatctacagcgccagcaatctggagaccggcgtgcctagcagattcagcggcagcggctccggcaccgacttcaccctgaccatcagccccctgctgcctgaggatttcgccacctactactgccagcaggtggtgtggagacctttcaccttcggccagggcaccaaggtggagatcaagcgggtggagcccaagagcagcgataagacccacacctgccccccctgccctgcccccgagctgctgggcggacccagcgtgttcctgttcccccccaagcctaaggacaccctgatgatcagcagaacccccgaggtgacctgcgtggtggtggatgtgagccacgaggaccctgaggtgaagttcaactggtacgtggacggcgtggaggtgcacaatgccaagaccaagcccagggaggagcagtacaacagcacctaccgggtggtgtccgtgctgaccgtgctgcaccaggattggctgaacggcaaggagtacaagtgcaaggtgtccaacaaggccctgcctgcccctatcgagaaaaccatcagcaaggccaagggccagcccagagagccccaggtgtacaccctgccccctagcagagatgagctgaccaagaaccaggtgtccctgacctgcctggtgaagggcttctaccccagcgacatcgccgtggagtgggagagcaacggccagcccgagaacaactacaagaccaccccccctgtgctggacagcgatggcagcttcttcctgtacagcaagctgaccgtggacaagagcagatggcagcagggcaacgtgttcagctgcagcgtgatgcacgaggccctgcacaatcactacacccagaagagcctgagcctgtcccctggcaagtga

SEQ ID NO: 186 - DNA, 1026 bp, Artificial Sequence
  Synthetic
gacatccagatgacccagagccccagcagcctgagcgcctctgtgggcgatagagtgaccatcacctgcagagccagccaggccatcgacagctacctgcactggtatcagcagaagcctggcaaggcccctaagctgctgatctacagcgccagcaatctggagaccggcgtgcctagcagattcagcggcagcggctccggcaccgacttcaccctgaccatcagcagcgccctgcctgaggatttcgccacctactactgccagcaggtggtgtggagacctttcaccttcggccagggcaccaaggtggagatcaagcgggtggagcccaagagcagcgataagacccacacctgccccccctgccctgcccccgagctgctgggcggacccagcgtgttcctgttcccccccaagcctaaggacaccctgatgatcagcagaacccccgaggtgacctgcgtggtggtggatgtgagccacgaggaccctgaggtgaagttcaactggtacgtggacggcgtggaggtgcacaatgccaagaccaagcccagggaggagcagtacaacagcacctaccgggtggtgtccgtgctgaccgtgctgcaccaggattggctgaacggcaaggagtacaagtgcaaggtgtccaacaaggccctgcctgcccctatcgagaaaaccatcagcaaggccaagggccagcccagagagccccaggtgtacaccctgccccctagcagagatgagctgaccaagaaccaggtgtccctgacctgcctggtgaagggcttctaccccagcgacatcgccgtggagtgggagagcaacggccagcccgagaacaactacaagaccaccccccctgtgctggacagcgatggcagcttcttcctgtacagcaagctgaccgtggacaagagcagatggcagcagggcaacgtgttcagctgcagcgtgatgcacgaggccctgcacaatcactacacccagaagagcctgagcctgtcccctggcaagtga

SEQ ID NO: 187 - DNA, 1026 bp, Artificial Sequence
  Synthetic
gacatccagatgacccagagccccagcagcctgagcgcctctgtgggcgatagagtgaccatcacctgcagagccagccaggccatcgacagctacctgcactggtatcagcagaagcctggcaaggcccctaagctgctgatctacagcgccagcaatctggagaccggcgtgcctagcagattcagcggcagcggctccggcaccgacttcaccctgaccatcagcagcctgctggccgaggatttcgccacctactactgccagcaggtggtgtggagacctttcaccttcggccagggcaccaaggtggagatcaagcgggtggagcccaagagcagcgataagacccacacctgccccccctgccctgcccccgagctgctgggcggacccagcgtgttcctgttcccccccaagcctaaggacaccctgatgatcagcagaacccccgaggtgacctgcgtggtggtggatgtgagccacgaggaccctgaggtgaagttcaactggtacgtggacggcgtggaggtgcacaatgccaagaccaagcccagggaggagcagtacaacagcacctaccgggtggtgtccgtgctgaccgtgctgcaccaggattggctgaacggcaaggagtacaagtgcaaggtgtccaacaaggccctgcctgcccctatcgagaaaaccatcagcaaggccaagggccagcccagagagccccaggtgtacaccctgccccctagcagagatgagctgaccaagaaccaggtgtccctgacctgcctggtgaagggcttctaccccagcgacatcgccgtggagtgggagagcaacggccagcccgagaacaactacaagaccaccccccctgtgctggacagcgatggcagcttcttcctgtacagcaagctgaccgtggacaagagcagatggcagcagggcaacgtgttcagctgcagcgtgatgcacgaggccctgcacaatcactacacccagaagagcctgagcctgtcccctggcaagtga

SEQ ID NO: 188 - DNA, 1026 bp, Artificial Sequence
  Synthetic
gacatccagatgacccagagccccagcagcctgagcgcctctgtgggcgatagagtgaccatcacctgcagagccagccaggccatcgacagctacctgcactggtatcagcagaagcctggcaaggcccctaagctgctgatctacagcgccagcaatctggagaccggcgtgcctagcagattcagcggcagcggctccggcaccgacttcaccctgaccatcagcagcctgctgagcgaggatttcgccacctactactgccagcaggtggtgtggagacctttcaccttcggccagggcaccaaggtggagatcaagcgggtggagcccaagagcagcgataagacccacacctgccccccctgccctgcccccgagctgctgggcggacccagcgtgttcctgttcccccccaagcctaaggacaccctgatgatcagcagaacccccgaggtgacctgcgtggtggtggatgtgagccacgaggaccctgaggtgaagttcaactggtacgtggacggcgtggaggtgcacaatgccaagaccaagcccagggaggagcagtacaacagcacctaccgggtggtgtccgtgctgaccgtgctgcaccaggattggctgaacggcaaggagtacaagtgcaaggtgtccaacaaggccctgcctgcccctatcgagaaaaccatcagcaaggccaagggccagcccagagagccccaggtgtacaccctgccccctagcagagatgagctgaccaagaaccaggtgtccctgacctgcctggtgaagggcttctaccccagcgacatcgccgtggagtgggagagcaacggccagcccgagaacaactacaagaccaccccccctgtgctggacagcgatggcagcttcttcctgtacagcaagctgaccgtggacaagagcagatggcagcagggcaacgtgttcagctgcagcgtgatgcacgaggccctgcacaatcactacacccagaagagcctgagcctgtcccctggcaagtga

SEQ ID NO: 189 - DNA, 1026 bp, Artificial Sequence
  Synthetic
gacatccagatgacccagagccccagcagcctgagcgcctctgtgggcgatagagtgaccatcacctgcagagccagccaggccatcgacagctacctgcactggtatcagcagaagcctggcaaggcccctaagctgctgatctacagcgccagcaatctggagaccggcgtgcctagcagattcagcggcagcggctccggcaccgacttcaccctgaccatcagcagcctgctgcctgccgatttcgccacctactactgccagcaggtggtgtggagacctttcaccttcggccagggcaccaaggtggagatcaagcgggtggagcccaagagcagcgataagacccacacctgccccccctgccctgcccccgagctgctgggcggacccagcgtgttcctgttcccccccaagcctaaggacaccctgatgatcagcagaacccccgaggtgacctgcgtggtggtggatgtgagccacgaggaccctgaggtgaagttcaactggtacgtggacggcgtggaggtgcacaatgccaagaccaagcccagggaggagcagtacaacagcacctaccgggtggtgtccgtgctgaccgtgctgcaccaggattggctgaacggcaaggagtacaagtgcaaggtgtccaacaaggccctgcctgcccctatcgagaaaaccatcagcaaggccaagggccagcccagagagccccaggtgtacaccctgccccctagcagagatgagctgaccaagaaccaggtgtccctgacctgcctggtgaagggcttctaccccagcgacatcgccgtggagtgggagagcaacggccagcccgagaacaactacaagaccaccccccctgtgctggacagcgatggcagcttcttcctgtacagcaagctgaccgtggacaagagcagatggcagcagggcaacgtgttcagctgcagcgtgatgcacgaggccctgcacaatcactacacccagaagagcctgagcctgtcccctggcaagtga

SEQ ID NO: 190 - DNA, 1026 bp, Artificial Sequence
  Synthetic
gacatccagatgacccagagccccagcagcctgagcgcctctgtgggcgatagagtgaccatcacctgcagagccagccaggccatcgacagctacctgcactggtatcagcagaagcctggcaaggcccctaagctgctgatctacagcgccagcaatctggagaccggcgtgcctagcagattcagcggcagcggctccggcaccgacttcaccctgaccatcagcagcctgctgcctgaggccttcgccacctactactgccagcaggtggtgtggagacctttcaccttcggccagggcaccaaggtggagatcaagcgggtggagcccaagagcagcgataagacccacacctgccccccctgccctgcccccgagctgctgggcggacccagcgtgttcctgttcccccccaagcctaaggacaccctgatgatcagcagaacccccgaggtgacctgcgtggtggtggatgtgagccacgaggaccctgaggtgaagttcaactggtacgtggacggcgtggaggtgcacaatgccaagaccaagcccagggaggagcagtacaacagcacctaccgggtggtgtccgtgctgaccgtgctgcaccaggattggctgaacggcaaggagtacaagtgcaaggtgtccaacaaggccctgcctgcccctatcgagaaaaccatcagcaaggccaagggccagcccagagagccccaggtgtacaccctgccccctagcagagatgagctgaccaagaaccaggtgtccctgacctgcctggtgaagggcttctaccccagcgacatcgccgtggagtgggagagcaacggccagcccgagaacaactacaagaccaccccccctgtgctggacagcgatggcagcttcttcctgtacagcaagctgaccgtggacaagagcagatggcagcagggcaacgtgttcagctgcagcgtgatgcacgaggccctgcacaatcactacacccagaagagcctgagcctgtcccctggcaagtga

SEQ ID NO: 191 - DNA, 1026 bp, Artificial Sequence
  Synthetic
gacatccagatgacccagagccccagcagcctgagcgcctctgtgggcgatagagtgaccatcacctgcagagccagccaggccatcgacagctacctgcactggtatcagcagaagcctggcaaggcccctaagctgctgatctacagcgccagcaatctggagaccggcgtgcctagcagattcagcggcagcggctccggcaccgacttcaccctgaccatcagcagcctgctgcctgaggatttcgccgcctactactgccagcaggtggtgtggagacctttcaccttcggccagggcaccaaggtggagatcaagcgggtggagcccaagagcagcgataagacccacacctgccccccctgccctgcccccgagctgctgggcggacccagcgtgttcctgttcccccccaagcctaaggacaccctgatgatcagcagaacccccgaggtgacctgcgtggtggtggatgtgagccacgaggaccctgaggtgaagttcaactggtacgtggacggcgtggaggtgcacaatgccaagaccaagcccagggaggagcagtacaacagcacctaccgggtggtgtccgtgctgaccgtgctgcaccaggattggctgaacggcaaggagtacaagtgcaaggtgtccaacaaggccctgcctgcccctatcgagaaaaccatcagcaaggccaagggccagcccagagagccccaggtgtacaccctgccccctagcagagatgagctgaccaagaaccaggtgtccctgacctgcctggtgaagggcttctaccccagcgacatcgccgtggagtgggagagcaacggccagcccgagaacaactacaagaccaccccccctgtgctggacagcgatggcagcttcttcctgtacagcaagctgaccgtggacaagagcagatggcagcagggcaacgtgttcagctgcagcgtgatgcacgaggccctgcacaatcactacacccagaagagcctgagcctgtcccctggcaagtga

SEQ ID NO: 192 - DNA, 1026 bp, Artificial Sequence
  Synthetic
gacatccagatgacccagagccccagcagcctgagcgcctctgtgggcgatagagtgaccatcacctgcagagccagccaggccatcgacagctacctgcactggtatcagcagaagcctggcaaggcccctaagctgctgatctacagcgccagcaatctggagaccggcgtgcctagcagattcagcggcagcggctccggcaccgacttcaccctgaccatcagcagcctgctgcctgaggatttcgcctactactactgccagcaggtggtgtggagacctttcaccttcggccagggcaccaaggtggagatcaagcgggtggagcccaagagcagcgataagacccacacctgccccccctgccctgcccccgagctgctgggcggacccagcgtgttcctgttcccccccaagcctaaggacaccctgatgatcagcagaacccccgaggtgacctgcgtggtggtggatgtgagccacgaggaccctgaggtgaagttcaactggtacgtggacggcgtggaggtgcacaatgccaagaccaagcccagggaggagcagtacaacagcacctaccgggtggtgtccgtgctgaccgtgctgcaccaggattggctgaacggcaaggagtacaagtgcaaggtgtccaacaaggccctgcctgcccctatcgagaaaaccatcagcaaggccaagggccagcccagagagccccaggtgtacaccctgccccctagcagagatgagctgaccaagaaccaggtgtccctgacctgcctggtgaagggcttctaccccagcgacatcgccgtggagtgggagagcaacggccagcccgagaacaactacaagaccaccccccctgtgctggacagcgatggcagcttcttcctgtacagcaagctgaccgtggacaagagcagatggcagcagggcaacgtgttcagctgcagcgtgatgcacgaggccctgcacaatcactacacccagaagagcctgagcctgtcccctggcaagtga

SEQ ID NO: 193 - DNA, 1026 bp, Artificial Sequence
  Synthetic
gacatccagatgacccagagccccagcagcctgagcgcctctgtgggcgatagagtgaccatcacctgcagagccagccaggccatcgacagctacctgcactggtatcagcagaagcctggcaaggcccctaagctgctgatctacagcgccagcaatctggagaccggcgtgcctagcagattcagcggcagcggctccggcaccgacttcaccctgaccatcagcagcctgctgcctgaggatttcgccaccgcctactgccagcaggtggtgtggagacctttcaccttcggccagggcaccaaggtggagatcaagcgggtggagcccaagagcagcgataagacccacacctgccccccctgccctgcccccgagctgctgggcggacccagcgtgttcctgttcccccccaagcctaaggacaccctgatgatcagcagaacccccgaggtgacctgcgtggtggtggatgtgagccacgaggaccctgaggtgaagttcaactggtacgtggacggcgtggaggtgcacaatgccaagaccaagcccagggaggagcagtacaacagcacctaccgggtggtgtccgtgctgaccgtgctgcaccaggattggctgaacggcaaggagtacaagtgcaaggtgtccaacaaggccctgcctgcccctatcgagaaaaccatcagcaaggccaagggccagcccagagagccccaggtgtacaccctgccccctagcagagatgagctgaccaagaaccaggtgtccctgacctgcctggtgaagggcttctaccccagcgacatcgccgtggagtgggagagcaacggccagcccgagaacaactacaagaccaccccccctgtgctggacagcgatggcagcttcttcctgtacagcaagctgaccgtggacaagagcagatggcagcagggcaacgtgttcagctgcagcgtgatgcacgaggccctgcacaatcactacacccagaagagcctgagcctgtcccctggcaagtga

SEQ ID NO: 194 - DNA, 1026 bp, Artificial Sequence
  Synthetic
gacatccagatgacccagagccccagcagcctgagcgcctctgtgggcgatagagtgaccatcacctgcagagccagccaggccatcgacagctacctgcactggtatcagcagaagcctggcaaggcccctaagctgctgatctacagcgccagcaatctggagaccggcgtgcctagcagattcagcggcagcggctccggcaccgacttcaccctgaccatcagcagcctgctgcctgaggatttcgccacctacgcctgccagcaggtggtgtggagacctttcaccttcggccagggcaccaaggtggagatcaagcgggtggagcccaagagcagcgataagacccacacctgccccccctgccctgcccccgagctgctgggcggacccagcgtgttcctgttcccccccaagcctaaggacaccctgatgatcagcagaacccccgaggtgacctgcgtggtggtggatgtgagccacgaggaccctgaggtgaagttcaactggtacgtggacggcgtggaggtgcacaatgccaagaccaagcccagggaggagcagtacaacagcacctaccgggtggtgtccgtgctgaccgtgctgcaccaggattggctgaacggcaaggagtacaagtgcaaggtgtccaacaaggccctgcctgcccctatcgagaaaaccatcagcaaggccaagggccagcccagagagccccaggtgtacaccctgccccctagcagagatgagctgaccaagaaccaggtgtccctgacctgcctggtgaagggcttctaccccagcgacatcgccgtggagtgggagagcaacggccagcccgagaacaactacaagaccaccccccctgtgctggacagcgatggcagcttcttcctgtacagcaagctgaccgtggacaagagcagatggcagcagggcaacgtgttcagctgcagcgtgatgcacgaggccctgcacaatcactacacccagaagagcctgagcctgtcccctggcaagtga

SEQ ID NO: 195 - DNA, 1026 bp, Artificial Sequence
  Synthetic
gacatccagatgacccagagccccagcagcctgagcgcctctgtgggcgatagagtgaccatcacctgcagagccagccaggccatcgacagctacctgcactggtatcagcagaagcctggcaaggcccctaagctgctgatctacagcgccagcaatctggagaccggcgtgcctagcagattcagcggcagcggctccggcaccgacttcaccctgaccatcagcagcctgctgcctgaggatttcgccacctactactgccagcaggtggtgtggagacctttcaccgccggccagggcaccaaggtggagatcaagcgggtggagcccaagagcagcgataagacccacacctgccccccctgccctgcccccgagctgctgggcggacccagcgtgttcctgttcccccccaagcctaaggacaccctgatgatcagcagaacccccgaggtgacctgcgtggtggtggatgtgagccacgaggaccctgaggtgaagttcaactggtacgtggacggcgtggaggtgcacaatgccaagaccaagcccagggaggagcagtacaacagcacctaccgggtggtgtccgtgctgaccgtgctgcaccaggattggctgaacggcaaggagtacaagtgcaaggtgtccaacaaggccctgcctgcccctatcgagaaaaccatcagcaaggccaagggccagcccagagagccccaggtgtacaccctgccccctagcagagatgagctgaccaagaaccaggtgtccctgacctgcctggtgaagggcttctaccccagcgacatcgccgtggagtgggagagcaacggccagcccgagaacaactacaagaccaccccccctgtgctggacagcgatggcagcttcttcctgtacagcaagctgaccgtggacaagagcagatggcagcagggcaacgtgttcagctgcagcgtgatgcacgaggccctgcacaatcactacacccagaagagcctgagcctgtcccctggcaagtga

SEQ ID NO: 196 - DNA, 1026 bp, Artificial Sequence
  Synthetic
gacatccagatgacccagagccccagcagcctgagcgcctctgtgggcgatagagtgaccatcacctgcagagccagccaggccatcgacagctacctgcactggtatcagcagaagcctggcaaggcccctaagctgctgatctacagcgccagcaatctggagaccggcgtgcctagcagattcagcggcagcggctccggcaccgacttcaccctgaccatcagcagcctgctgcctgaggatttcgccacctactactgccagcaggtggtgtggagacctttcaccttcggcgccggcaccaaggtggagatcaagcgggtggagcccaagagcagcgataagacccacacctgccccccctgccctgcccccgagctgctgggcggacccagcgtgttcctgttcccccccaagcctaaggacaccctgatgatcagcagaacccccgaggtgacctgcgtggtggtggatgtgagccacgaggaccctgaggtgaagttcaactggtacgtggacggcgtggaggtgcacaatgccaagaccaagcccagggaggagcagtacaacagcacctaccgggtggtgtccgtgctgaccgtgctgcaccaggattggctgaacggcaaggagtacaagtgcaaggtgtccaacaaggccctgcctgcccctatcgagaaaaccatcagcaaggccaagggccagcccagagagccccaggtgtacaccctgccccctagcagagatgagctgaccaagaaccaggtgtccctgacctgcctggtgaagggcttctaccccagcgacatcgccgtggagtgggagagcaacggccagcccgagaacaactacaagaccaccccccctgtgctggacagcgatggcagcttcttcctgtacagcaagctgaccgtggacaagagcagatggcagcagggcaacgtgttcagctgcagcgtgatgcacgaggccctgcacaatcactacacccagaagagcctgagcctgtcccctggcaagtga

SEQ ID NO: 197 - DNA, 1026 bp, Artificial Sequence
  Synthetic
gacatccagatgacccagagccccagcagcctgagcgcctctgtgggcgatagagtgaccatcacctgcagagccagccaggccatcgacagctacctgcactggtatcagcagaagcctggcaaggcccctaagctgctgatctacagcgccagcaatctggagaccggcgtgcctagcagattcagcggcagcggctccggcaccgacttcaccctgaccatcagcagcctgctgcctgaggatttcgccacctactactgccagcaggtggtgtggagacctttcaccttcggccagggcgccaaggtggagatcaagcgggtggagcccaagagcagcgataagacccacacctgccccccctgccctgcccccgagctgctgggcggacccagcgtgttcctgttcccccccaagcctaaggacaccctgatgatcagcagaacccccgaggtgacctgcgtggtggtggatgtgagccacgaggaccctgaggtgaagttcaactggtacgtggacggcgtggaggtgcacaatgccaagaccaagcccagggaggagcagtacaacagcacctaccgggtggtgtccgtgctgaccgtgctgcaccaggattggctgaacggcaaggagtacaagtgcaaggtgtccaacaaggccctgcctgcccctatcgagaaaaccatcagcaaggccaagggccagcccagagagccccaggtgtacaccctgccccctagcagagatgagctgaccaagaaccaggtgtccctgacctgcctggtgaagggcttctaccccagcgacatcgccgtggagtgggagagcaacggccagcccgagaacaactacaagaccaccccccctgtgctggacagcgatggcagcttcttcctgtacagcaagctgaccgtggacaagagcagatggcagcagggcaacgtgttcagctgcagcgtgatgcacgaggccctgcacaatcactacacccagaagagcctgagcctgtcccctggcaagtga

SEQ ID NO: 198 - DNA, 1026 bp, Artificial Sequence
  Synthetic
gacatccagatgacccagagccccagcagcctgagcgcctctgtgggcgatagagtgaccatcacctgcagagccagccaggccatcgacagctacctgcactggtatcagcagaagcctggcaaggcccctaagctgctgatctacagcgccagcaatctggagaccggcgtgcctagcagattcagcggcagcggctccggcaccgacttcaccctgaccatcagcagcctgctgcctgaggatttcgccacctactactgccagcaggtggtgtggagacctttcaccttcggccagggcaccgccgtggagatcaagcgggtggagcccaagagcagcgataagacccacacctgccccccctgccctgcccccgagctgctgggcggacccagcgtgttcctgttcccccccaagcctaaggacaccctgatgatcagcagaacccccgaggtgacctgcgtggtggtggatgtgagccacgaggaccctgaggtgaagttcaactggtacgtggacggcgtggaggtgcacaatgccaagaccaagcccagggaggagcagtacaacagcacctaccgggtggtgtccgtgctgaccgtgctgcaccaggattggctgaacggcaaggagtacaagtgcaaggtgtccaacaaggccctgcctgcccctatcgagaaaaccatcagcaaggccaagggccagcccagagagccccaggtgtacaccctgccccctagcagagatgagctgaccaagaaccaggtgtccctgacctgcctggtgaagggcttctaccccagcgacatcgccgtggagtgggagagcaacggccagcccgagaacaactacaagaccaccccccctgtgctggacagcgatggcagcttcttcctgtacagcaagctgaccgtggacaagagcagatggcagcagggcaacgtgttcagctgcagcgtgatgcacgaggccctgcacaatcactacacccagaagagcctgagcctgtcccctggcaagtga

SEQ ID NO: 199 - DNA, 1026 bp, Artificial Sequence
  Synthetic
gacatccagatgacccagagccccagcagcctgagcgcctctgtgggcgatagagtgaccatcacctgcagagccagccaggccatcgacagctacctgcactggtatcagcagaagcctggcaaggcccctaagctgctgatctacagcgccagcaatctggagaccggcgtgcctagcagattcagcggcagcggctccggcaccgacttcaccctgaccatcagcagcctgctgcctgaggatttcgccacctactactgccagcaggtggtgtggagacctttcaccttcggccagggcaccaaggccgagatcaagcgggtggagcccaagagcagcgataagacccacacctgccccccctgccctgcccccgagctgctgggcggacccagcgtgttcctgttcccccccaagcctaaggacaccctgatgatcagcagaacccccgaggtgacctgcgtggtggtggatgtgagccacgaggaccctgaggtgaagttcaactggtacgtggacggcgtggaggtgcacaatgccaagaccaagcccagggaggagcagtacaacagcacctaccgggtggtgtccgtgctgaccgtgctgcaccaggattggctgaacggcaaggagtacaagtgcaaggtgtccaacaaggccctgcctgcccctatcgagaaaaccatcagcaaggccaagggccagcccagagagccccaggtgtacaccctgccccctagcagagatgagctgaccaagaaccaggtgtccctgacctgcctggtgaagggcttctaccccagcgacatcgccgtggagtgggagagcaacggccagcccgagaacaactacaagaccaccccccctgtgctggacagcgatggcagcttcttcctgtacagcaagctgaccgtggacaagagcagatggcagcagggcaacgtgttcagctgcagcgtgatgcacgaggccctgcacaatcactacacccagaagagcctgagcctgtcccctggcaagtga

SEQ ID NO: 200 - DNA, 1026 bp, Artificial Sequence
  Synthetic
gacatccagatgacccagagccccagcagcctgagcgcctctgtgggcgatagagtgaccatcacctgcagagccagccaggccatcgacagctacctgcactggtatcagcagaagcctggcaaggcccctaagctgctgatctacagcgccagcaatctggagaccggcgtgcctagcagattcagcggcagcggctccggcaccgacttcaccctgaccatcagcagcctgctgcctgaggatttcgccacctactactgccagcaggtggtgtggagacctttcaccttcggccagggcaccaaggtggccatcaagcgggtggagcccaagagcagcgataagacccacacctgccccccctgccctgcccccgagctgctgggcggacccagcgtgttcctgttcccccccaagcctaaggacaccctgatgatcagcagaacccccgaggtgacctgcgtggtggtggatgtgagccacgaggaccctgaggtgaagttcaactggtacgtggacggcgtggaggtgcacaatgccaagaccaagcccagggaggagcagtacaacagcacctaccgggtggtgtccgtgctgaccgtgctgcaccaggattggctgaacggcaaggagtacaagtgcaaggtgtccaacaaggccctgcctgcccctatcgagaaaaccatcagcaaggccaagggccagcccagagagccccaggtgtacaccctgccccctagcagagatgagctgaccaagaaccaggtgtccctgacctgcctggtgaagggcttctaccccagcgacatcgccgtggagtgggagagcaacggccagcccgagaacaactacaagaccaccccccctgtgctggacagcgatggcagcttcttcctgtacagcaagctgaccgtggacaagagcagatggcagcagggcaacgtgttcagctgcagcgtgatgcacgaggccctgcacaatcactacacccagaagagcctgagcctgtcccctggcaagtga

SEQ ID NO: 201 - DNA, 1026 bp, Artificial Sequence
  Synthetic
gacatccagatgacccagagccccagcagcctgagcgcctctgtgggcgatagagtgaccatcacctgcagagccagccaggccatcgacagctacctgcactggtatcagcagaagcctggcaaggcccctaagctgctgatctacagcgccagcaatctggagaccggcgtgcctagcagattcagcggcagcggctccggcaccgacttcaccctgaccatcagcagcctgctgcctgaggatttcgccacctactactgccagcaggtggtgtggagacctttcaccttcggccagggcaccaaggtggaggccaagcgggtggagcccaagagcagcgataagacccacacctgccccccctgccctgcccccgagctgctgggcggacccagcgtgttcctgttcccccccaagcctaaggacaccctgatgatcagcagaacccccgaggtgacctgcgtggtggtggatgtgagccacgaggaccctgaggtgaagttcaactggtacgtggacggcgtggaggtgcacaatgccaagaccaagcccagggaggagcagtacaacagcacctaccgggtggtgtccgtgctgaccgtgctgcaccaggattggctgaacggcaaggagtacaagtgcaaggtgtccaacaaggccctgcctgcccctatcgagaaaaccatcagcaaggccaagggccagcccagagagccccaggtgtacaccctgccccctagcagagatgagctgaccaagaaccaggtgtccctgacctgcctggtgaagggcttctaccccagcgacatcgccgtggagtgggagagcaacggccagcccgagaacaactacaagaccaccccccctgtgctggacagcgatggcagcttcttcctgtacagcaagctgaccgtggacaagagcagatggcagcagggcaacgtgttcagctgcagcgtgatgcacgaggccctgcacaatcactacacccagaagagcctgagcctgtcccctggcaagtga

SEQ ID NO: 202 - DNA, 1026 bp, Artificial Sequence
  Synthetic
gacatccagatgacccagagccccagcagcctgagcgcctctgtgggcgatagagtgaccatcacctgcagagccagccaggccatcgacagctacctgcactggtatcagcagaagcctggcaaggcccctaagctgctgatctacagcgccagcaatctggagaccggcgtgcctagcagattcagcggcagcggctccggcaccgacttcaccctgaccatcagcagcctgctgcctgaggatttcgccacctactactgccagcaggtggtgtggagacctttcaccttcggccagggcaccaaggtggagatcgcccgggtggagcccaagagcagcgataagacccacacctgccccccctgccctgcccccgagctgctgggcggacccagcgtgttcctgttcccccccaagcctaaggacaccctgatgatcagcagaacccccgaggtgacctgcgtggtggtggatgtgagccacgaggaccctgaggtgaagttcaactggtacgtggacggcgtggaggtgcacaatgccaagaccaagcccagggaggagcagtacaacagcacctaccgggtggtgtccgtgctgaccgtgctgcaccaggattggctgaacggcaaggagtacaagtgcaaggtgtccaacaaggccctgcctgcccctatcgagaaaaccatcagcaaggccaagggccagcccagagagccccaggtgtacaccctgccccctagcagagatgagctgaccaagaaccaggtgtccctgacctgcctggtgaagggcttctaccccagcgacatcgccgtggagtgggagagcaacggccagcccgagaacaactacaagaccaccccccctgtgctggacagcgatggcagcttcttcctgtacagcaagctgaccgtggacaagagcagatggcagcagggcaacgtgttcagctgcagcgtgatgcacgaggccctgcacaatcactacacccagaagagcctgagcctgtcccctggcaagtga

SEQ ID NO: 203 - DNA, 1026 bp, Artificial Sequence
  Synthetic
agcatccagatgacccagagccccagcagcctgagcgcctctgtgggcgatagagtgaccatcacctgcagagccagccaggccatcgacagctacctgcactggtatcagcagaagcctggcaaggcccctaagctgctgatctacagcgccagcaatctggagaccggcgtgcctagcagattcagcggcagcggctccggcaccgacttcaccctgaccatcagcagcctgctgcctgaggatttcgccacctactactgccagcaggtggtgtggagacctttcaccttcggccagggcaccaaggtggagatcaagcgggtggagcccaagagcagcgataagacccacacctgccccccctgccctgcccccgagctgctgggcggacccagcgtgttcctgttcccccccaagcctaaggacaccctgatgatcagcagaacccccgaggtgacctgcgtggtggtggatgtgagccacgaggaccctgaggtgaagttcaactggtacgtggacggcgtggaggtgcacaatgccaagaccaagcccagggaggagcagtacaacagcacctaccgggtggtgtccgtgctgaccgtgctgcaccaggattggctgaacggcaaggagtacaagtgcaaggtgtccaacaaggccctgcctgcccctatcgagaaaaccatcagcaaggccaagggccagcccagagagccccaggtgtacaccctgccccctagcagagatgagctgaccaagaaccaggtgtccctgacctgcctggtgaagggcttctaccccagcgacatcgccgtggagtgggagagcaacggccagcccgagaacaactacaagaccaccccccctgtgctggacagcgatggcagcttcttcctgtacagcaagctgaccgtggacaagagcagatggcagcagggcaacgtgttcagctgcagcgtgatgcacgaggccctgcacaatcactacacccagaagagcctgagcctgtcccctggcaagtga

SEQ ID NO: 204 - DNA, 1026 bp, Artificial Sequence
  Synthetic
ctgatccagatgacccagagccccagcagcctgagcgcctctgtgggcgatagagtgaccatcacctgcagagccagccaggccatcgacagctacctgcactggtatcagcagaagcctggcaaggcccctaagctgctgatctacagcgccagcaatctggagaccggcgtgcctagcagattcagcggcagcggctccggcaccgacttcaccctgaccatcagcagcctgctgcctgaggatttcgccacctactactgccagcaggtggtgtggagacctttcaccttcggccagggcaccaaggtggagatcaagcgggtggagcccaagagcagcgataagacccacacctgccccccctgccctgcccccgagctgctgggcggacccagcgtgttcctgttcccccccaagcctaaggacaccctgatgatcagcagaacccccgaggtgacctgcgtggtggtggatgtgagccacgaggaccctgaggtgaagttcaactggtacgtggacggcgtggaggtgcacaatgccaagaccaagcccagggaggagcagtacaacagcacctaccgggtggtgtccgtgctgaccgtgctgcaccaggattggctgaacggcaaggagtacaagtgcaaggtgtccaacaaggccctgcctgcccctatcgagaaaaccatcagcaaggccaagggccagcccagagagccccaggtgtacaccctgccccctagcagagatgagctgaccaagaaccaggtgtccctgacctgcctggtgaagggcttctaccccagcgacatcgccgtggagtgggagagcaacggccagcccgagaacaactacaagaccaccccccctgtgctggacagcgatggcagcttcttcctgtacagcaagctgaccgtggacaagagcagatggcagcagggcaacgtgttcagctgcagcgtgatgcacgaggccctgcacaatcactacacccagaagagcctgagcctgtcccctggcaagtga

SEQ ID NO: 205 - DNA, 1026 bp, Artificial Sequence
  Synthetic
cagatccagatgacccagagccccagcagcctgagcgcctctgtgggcgatagagtgaccatcacctgcagagccagccaggccatcgacagctacctgcactggtatcagcagaagcctggcaaggcccctaagctgctgatctacagcgccagcaatctggagaccggcgtgcctagcagattcagcggcagcggctccggcaccgacttcaccctgaccatcagcagcctgctgcctgaggatttcgccacctactactgccagcaggtggtgtggagacctttcaccttcggccagggcaccaaggtggagatcaagcgggtggagcccaagagcagcgataagacccacacctgccccccctgccctgcccccgagctgctgggcggacccagcgtgttcctgttcccccccaagcctaaggacaccctgatgatcagcagaacccccgaggtgacctgcgtggtggtggatgtgagccacgaggaccctgaggtgaagttcaactggtacgtggacggcgtggaggtgcacaatgccaagaccaagcccagggaggagcagtacaacagcacctaccgggtggtgtccgtgctgaccgtgctgcaccaggattggctgaacggcaaggagtacaagtgcaaggtgtccaacaaggccctgcctgcccctatcgagaaaaccatcagcaaggccaagggccagcccagagagccccaggtgtacaccctgccccctagcagagatgagctgaccaagaaccaggtgtccctgacctgcctggtgaagggcttctaccccagcgacatcgccgtggagtgggagagcaacggccagcccgagaacaactacaagaccaccccccctgtgctggacagcgatggcagcttcttcctgtacagcaagctgaccgtggacaagagcagatggcagcagggcaacgtgttcagctgcagcgtgatgcacgaggccctgcacaatcactacacccagaagagcctgagcctgtcccctggcaagtga

SEQ ID NO: 206 - DNA, 1026 bp, Artificial Sequence
  Synthetic
cacatccagatgacccagagccccagcagcctgagcgcctctgtgggcgatagagtgaccatcacctgcagagccagccaggccatcgacagctacctgcactggtatcagcagaagcctggcaaggcccctaagctgctgatctacagcgccagcaatctggagaccggcgtgcctagcagattcagcggcagcggctccggcaccgacttcaccctgaccatcagcagcctgctgcctgaggatttcgccacctactactgccagcaggtggtgtggagacctttcaccttcggccagggcaccaaggtggagatcaagcgggtggagcccaagagcagcgataagacccacacctgccccccctgccctgcccccgagctgctgggcggacccagcgtgttcctgttcccccccaagcctaaggacaccctgatgatcagcagaacccccgaggtgacctgcgtggtggtggatgtgagccacgaggaccctgaggtgaagttcaactggtacgtggacggcgtggaggtgcacaatgccaagaccaagcccagggaggagcagtacaacagcacctaccgggtggtgtccgtgctgaccgtgctgcaccaggattggctgaacggcaaggagtacaagtgcaaggtgtccaacaaggccctgcctgcccctatcgagaaaaccatcagcaaggccaagggccagcccagagagccccaggtgtacaccctgccccctagcagagatgagctgaccaagaaccaggtgtccctgacctgcctggtgaagggcttctaccccagcgacatcgccgtggagtgggagagcaacggccagcccgagaacaactacaagaccaccccccctgtgctggacagcgatggcagcttcttcctgtacagcaagctgaccgtggacaagagcagatggcagcagggcaacgtgttcagctgcagcgtgatgcacgaggccctgcacaatcactacacccagaagagcctgagcctgtcccctggcaagtga

SEQ ID NO: 207 - DNA, 1026 bp, Artificial Sequence
  Synthetic
cccatccagatgacccagagccccagcagcctgagcgcctctgtgggcgatagagtgaccatcacctgcagagccagccaggccatcgacagctacctgcactggtatcagcagaagcctggcaaggcccctaagctgctgatctacagcgccagcaatctggagaccggcgtgcctagcagattcagcggcagcggctccggcaccgacttcaccctgaccatcagcagcctgctgcctgaggatttcgccacctactactgccagcaggtggtgtggagacctttcaccttcggccagggcaccaaggtggagatcaagcgggtggagcccaagagcagcgataagacccacacctgccccccctgccctgcccccgagctgctgggcggacccagcgtgttcctgttcccccccaagcctaaggacaccctgatgatcagcagaacccccgaggtgacctgcgtggtggtggatgtgagccacgaggaccctgaggtgaagttcaactggtacgtggacggcgtggaggtgcacaatgccaagaccaagcccagggaggagcagtacaacagcacctaccgggtggtgtccgtgctgaccgtgctgcaccaggattggctgaacggcaaggagtacaagtgcaaggtgtccaacaaggccctgcctgcccctatcgagaaaaccatcagcaaggccaagggccagcccagagagccccaggtgtacaccctgccccctagcagagatgagctgaccaagaaccaggtgtccctgacctgcctggtgaagggcttctaccccagcgacatcgccgtggagtgggagagcaacggccagcccgagaacaactacaagaccaccccccctgtgctggacagcgatggcagcttcttcctgtacagcaagctgaccgtggacaagagcagatggcagcagggcaacgtgttcagctgcagcgtgatgcacgaggccctgcacaatcactacacccagaagagcctgagcctgtcccctggcaagtga

SEQ ID NO: 208 - DNA, 1026 bp, Artificial Sequence
  Synthetic
aagatccagatgacccagagccccagcagcctgagcgcctctgtgggcgatagagtgaccatcacctgcagagccagccaggccatcgacagctacctgcactggtatcagcagaagcctggcaaggcccctaagctgctgatctacagcgccagcaatctggagaccggcgtgcctagcagattcagcggcagcggctccggcaccgacttcaccctgaccatcagcagcctgctgcctgaggatttcgccacctactactgccagcaggtggtgtggagacctttcaccttcggccagggcaccaaggtggagatcaagcgggtggagcccaagagcagcgataagacccacacctgccccccctgccctgcccccgagctgctgggcggacccagcgtgttcctgttcccccccaagcctaaggacaccctgatgatcagcagaacccccgaggtgacctgcgtggtggtggatgtgagccacgaggaccctgaggtgaagttcaactggtacgtggacggcgtggaggtgcacaatgccaagaccaagcccagggaggagcagtacaacagcacctaccgggtggtgtccgtgctgaccgtgctgcaccaggattggctgaacggcaaggagtacaagtgcaaggtgtccaacaaggccctgcctgcccctatcgagaaaaccatcagcaaggccaagggccagcccagagagccccaggtgtacaccctgccccctagcagagatgagctgaccaagaaccaggtgtccctgacctgcctggtgaagggcttctaccccagcgacatcgccgtggagtgggagagcaacggccagcccgagaacaactacaagaccaccccccctgtgctggacagcgatggcagcttcttcctgtacagcaagctgaccgtggacaagagcagatggcagcagggcaacgtgttcagctgcagcgtgatgcacgaggccctgcacaatcactacacccagaagagcctgagcctgtcccctggcaagtga

SEQ ID NO: 209 - DNA, 1026 bp, Artificial Sequence
  Synthetic
gacagccagatgacccagagccccagcagcctgagcgcctctgtgggcgatagagtgaccatcacctgcagagccagccaggccatcgacagctacctgcactggtatcagcagaagcctggcaaggcccctaagctgctgatctacagcgccagcaatctggagaccggcgtgcctagcagattcagcggcagcggctccggcaccgacttcaccctgaccatcagcagcctgctgcctgaggatttcgccacctactactgccagcaggtggtgtggagacctttcaccttcggccagggcaccaaggtggagatcaagcgggtggagcccaagagcagcgataagacccacacctgccccccctgccctgcccccgagctgctgggcggacccagcgtgttcctgttcccccccaagcctaaggacaccctgatgatcagcagaacccccgaggtgacctgcgtggtggtggatgtgagccacgaggaccctgaggtgaagttcaactggtacgtggacggcgtggaggtgcacaatgccaagaccaagcccagggaggagcagtacaacagcacctaccgggtggtgtccgtgctgaccgtgctgcaccaggattggctgaacggcaaggagtacaagtgcaaggtgtccaacaaggccctgcctgcccctatcgagaaaaccatcagcaaggccaagggccagcccagagagccccaggtgtacaccctgccccctagcagagatgagctgaccaagaaccaggtgtccctgacctgcctggtgaagggcttctaccccagcgacatcgccgtggagtgggagagcaacggccagcccgagaacaactacaagaccaccccccctgtgctggacagcgatggcagcttcttcctgtacagcaagctgaccgtggacaagagcagatggcagcagggcaacgtgttcagctgcagcgtgatgcacgaggccctgcacaatcactacacccagaagagcctgagcctgtcccctggcaagtga

SEQ ID NO: 210 - DNA, 1026 bp, Artificial Sequence
  Synthetic
gacctgcagatgacccagagccccagcagcctgagcgcctctgtgggcgatagagtgaccatcacctgcagagccagccaggccatcgacagctacctgcactggtatcagcagaagcctggcaaggcccctaagctgctgatctacagcgccagcaatctggagaccggcgtgcctagcagattcagcggcagcggctccggcaccgacttcaccctgaccatcagcagcctgctgcctgaggatttcgccacctactactgccagcaggtggtgtggagacctttcaccttcggccagggcaccaaggtggagatcaagcgggtggagcccaagagcagcgataagacccacacctgccccccctgccctgcccccgagctgctgggcggacccagcgtgttcctgttcccccccaagcctaaggacaccctgatgatcagcagaacccccgaggtgacctgcgtggtggtggatgtgagccacgaggaccctgaggtgaagttcaactggtacgtggacggcgtggaggtgcacaatgccaagaccaagcccagggaggagcagtacaacagcacctaccgggtggtgtccgtgctgaccgtgctgcaccaggattggctgaacggcaaggagtacaagtgcaaggtgtccaacaaggccctgcctgcccctatcgagaaaaccatcagcaaggccaagggccagcccagagagccccaggtgtacaccctgccccctagcagagatgagctgaccaagaaccaggtgtccctgacctgcctggtgaagggcttctaccccagcgacatcgccgtggagtgggagagcaacggccagcccgagaacaactacaagaccaccccccctgtgctggacagcgatggcagcttcttcctgtacagcaagctgaccgtggacaagagcagatggcagcagggcaacgtgttcagctgcagcgtgatgcacgaggccctgcacaatcactacacccagaagagcctgagcctgtcccctggcaagtga

SEQ ID NO: 211 - DNA, 1026 bp, Artificial Sequence
  Synthetic
gacgaccagatgacccagagccccagcagcctgagcgcctctgtgggcgatagagtgaccatcacctgcagagccagccaggccatcgacagctacctgcactggtatcagcagaagcctggcaaggcccctaagctgctgatctacagcgccagcaatctggagaccggcgtgcctagcagattcagcggcagcggctccggcaccgacttcaccctgaccatcagcagcctgctgcctgaggatttcgccacctactactgccagcaggtggtgtggagacctttcaccttcggccagggcaccaaggtggagatcaagcgggtggagcccaagagcagcgataagacccacacctgccccccctgccctgcccccgagctgctgggcggacccagcgtgttcctgttcccccccaagcctaaggacaccctgatgatcagcagaacccccgaggtgacctgcgtggtggtggatgtgagccacgaggaccctgaggtgaagttcaactggtacgtggacggcgtggaggtgcacaatgccaagaccaagcccagggaggagcagtacaacagcacctaccgggtggtgtccgtgctgaccgtgctgcaccaggattggctgaacggcaaggagtacaagtgcaaggtgtccaacaaggccctgcctgcccctatcgagaaaaccatcagcaaggccaagggccagcccagagagccccaggtgtacaccctgccccctagcagagatgagctgaccaagaaccaggtgtccctgacctgcctggtgaagggcttctaccccagcgacatcgccgtggagtgggagagcaacggccagcccgagaacaactacaagaccaccccccctgtgctggacagcgatggcagcttcttcctgtacagcaagctgaccgtggacaagagcagatggcagcagggcaacgtgttcagctgcagcgtgatgcacgaggccctgcacaatcactacacccagaagagcctgagcctgtcccctggcaagtga

SEQ ID NO: 212 - DNA, 1026 bp, Artificial Sequence
  Synthetic
gaccagcagatgacccagagccccagcagcctgagcgcctctgtgggcgatagagtgaccatcacctgcagagccagccaggccatcgacagctacctgcactggtatcagcagaagcctggcaaggcccctaagctgctgatctacagcgccagcaatctggagaccggcgtgcctagcagattcagcggcagcggctccggcaccgacttcaccctgaccatcagcagcctgctgcctgaggatttcgccacctactactgccagcaggtggtgtggagacctttcaccttcggccagggcaccaaggtggagatcaagcgggtggagcccaagagcagcgataagacccacacctgccccccctgccctgcccccgagctgctgggcggacccagcgtgttcctgttcccccccaagcctaaggacaccctgatgatcagcagaacccccgaggtgacctgcgtggtggtggatgtgagccacgaggaccctgaggtgaagttcaactggtacgtggacggcgtggaggtgcacaatgccaagaccaagcccagggaggagcagtacaacagcacctaccgggtggtgtccgtgctgaccgtgctgcaccaggattggctgaacggcaaggagtacaagtgcaaggtgtccaacaaggccctgcctgcccctatcgagaaaaccatcagcaaggccaagggccagcccagagagccccaggtgtacaccctgccccctagcagagatgagctgaccaagaaccaggtgtccctgacctgcctggtgaagggcttctaccccagcgacatcgccgtggagtgggagagcaacggccagcccgagaacaactacaagaccaccccccctgtgctggacagcgatggcagcttcttcctgtacagcaagctgaccgtggacaagagcagatggcagcagggcaacgtgttcagctgcagcgtgatgcacgaggccctgcacaatcactacacccagaagagcctgagcctgtcccctggcaagtga

SEQ ID NO: 213 - DNA, 1026 bp, Artificial Sequence
  Synthetic
gaccaccagatgacccagagccccagcagcctgagcgcctctgtgggcgatagagtgaccatcacctgcagagccagccaggccatcgacagctacctgcactggtatcagcagaagcctggcaaggcccctaagctgctgatctacagcgccagcaatctggagaccggcgtgcctagcagattcagcggcagcggctccggcaccgacttcaccctgaccatcagcagcctgctgcctgaggatttcgccacctactactgccagcaggtggtgtggagacctttcaccttcggccagggcaccaaggtggagatcaagcgggtggagcccaagagcagcgataagacccacacctgccccccctgccctgcccccgagctgctgggcggacccagcgtgttcctgttcccccccaagcctaaggacaccctgatgatcagcagaacccccgaggtgacctgcgtggtggtggatgtgagccacgaggaccctgaggtgaagttcaactggtacgtggacggcgtggaggtgcacaatgccaagaccaagcccagggaggagcagtacaacagcacctaccgggtggtgtccgtgctgaccgtgctgcaccaggattggctgaacggcaaggagtacaagtgcaaggtgtccaacaaggccctgcctgcccctatcgagaaaaccatcagcaaggccaagggccagcccagagagccccaggtgtacaccctgccccctagcagagatgagctgaccaagaaccaggtgtccctgacctgcctggtgaagggcttctaccccagcgacatcgccgtggagtgggagagcaacggccagcccgagaacaactacaagaccaccccccctgtgctggacagcgatggcagcttcttcctgtacagcaagctgaccgtggacaagagcagatggcagcagggcaacgtgttcagctgcagcgtgatgcacgaggccctgcacaatcactacacccagaagagcctgagcctgtcccctggcaagtga

SEQ ID NO: 214 - DNA, 1026 bp, Artificial Sequence
  Synthetic
gacccccagatgacccagagccccagcagcctgagcgcctctgtgggcgatagagtgaccatcacctgcagagccagccaggccatcgacagctacctgcactggtatcagcagaagcctggcaaggcccctaagctgctgatctacagcgccagcaatctggagaccggcgtgcctagcagattcagcggcagcggctccggcaccgacttcaccctgaccatcagcagcctgctgcctgaggatttcgccacctactactgccagcaggtggtgtggagacctttcaccttcggccagggcaccaaggtggagatcaagcgggtggagcccaagagcagcgataagacccacacctgccccccctgccctgcccccgagctgctgggcggacccagcgtgttcctgttcccccccaagcctaaggacaccctgatgatcagcagaacccccgaggtgacctgcgtggtggtggatgtgagccacgaggaccctgaggtgaagttcaactggtacgtggacggcgtggaggtgcacaatgccaagaccaagcccagggaggagcagtacaacagcacctaccgggtggtgtccgtgctgaccgtgctgcaccaggattggctgaacggcaaggagtacaagtgcaaggtgtccaacaaggccctgcctgcccctatcgagaaaaccatcagcaaggccaagggccagcccagagagccccaggtgtacaccctgccccctagcagagatgagctgaccaagaaccaggtgtccctgacctgcctggtgaagggcttctaccccagcgacatcgccgtggagtgggagagcaacggccagcccgagaacaactacaagaccaccccccctgtgctggacagcgatggcagcttcttcctgtacagcaagctgaccgtggacaagagcagatggcagcagggcaacgtgttcagctgcagcgtgatgcacgaggccctgcacaatcactacacccagaagagcctgagcctgtcccctggcaagtga

SEQ ID NO: 215 - DNA, 1026 bp, Artificial Sequence
  Synthetic
gacaagcagatgacccagagccccagcagcctgagcgcctctgtgggcgatagagtgaccatcacctgcagagccagccaggccatcgacagctacctgcactggtatcagcagaagcctggcaaggcccctaagctgctgatctacagcgccagcaatctggagaccggcgtgcctagcagattcagcggcagcggctccggcaccgacttcaccctgaccatcagcagcctgctgcctgaggatttcgccacctactactgccagcaggtggtgtggagacctttcaccttcggccagggcaccaaggtggagatcaagcgggtggagcccaagagcagcgataagacccacacctgccccccctgccctgcccccgagctgctgggcggacccagcgtgttcctgttcccccccaagcctaaggacaccctgatgatcagcagaacccccgaggtgacctgcgtggtggtggatgtgagccacgaggaccctgaggtgaagttcaactggtacgtggacggcgtggaggtgcacaatgccaagaccaagcccagggaggagcagtacaacagcacctaccgggtggtgtccgtgctgaccgtgctgcaccaggattggctgaacggcaaggagtacaagtgcaaggtgtccaacaaggccctgcctgcccctatcgagaaaaccatcagcaaggccaagggccagcccagagagccccaggtgtacaccctgccccctagcagagatgagctgaccaagaaccaggtgtccctgacctgcctggtgaagggcttctaccccagcgacatcgccgtggagtgggagagcaacggccagcccgagaacaactacaagaccaccccccctgtgctggacagcgatggcagcttcttcctgtacagcaagctgaccgtggacaagagcagatggcagcagggcaacgtgttcagctgcagcgtgatgcacgaggccctgcacaatcactacacccagaagagcctgagcctgtcccctggcaagtga

SEQ ID NO: 216 - DNA, 1026 bp, Artificial Sequence
  Synthetic
gacatcagcatgacccagagccccagcagcctgagcgcctctgtgggcgatagagtgaccatcacctgcagagccagccaggccatcgacagctacctgcactggtatcagcagaagcctggcaaggcccctaagctgctgatctacagcgccagcaatctggagaccggcgtgcctagcagattcagcggcagcggctccggcaccgacttcaccctgaccatcagcagcctgctgcctgaggatttcgccacctactactgccagcaggtggtgtggagacctttcaccttcggccagggcaccaaggtggagatcaagcgggtggagcccaagagcagcgataagacccacacctgccccccctgccctgcccccgagctgctgggcggacccagcgtgttcctgttcccccccaagcctaaggacaccctgatgatcagcagaacccccgaggtgacctgcgtggtggtggatgtgagccacgaggaccctgaggtgaagttcaactggtacgtggacggcgtggaggtgcacaatgccaagaccaagcccagggaggagcagtacaacagcacctaccgggtggtgtccgtgctgaccgtgctgcaccaggattggctgaacggcaaggagtacaagtgcaaggtgtccaacaaggccctgcctgcccctatcgagaaaaccatcagcaaggccaagggccagcccagagagccccaggtgtacaccctgccccctagcagagatgagctgaccaagaaccaggtgtccctgacctgcctggtgaagggcttctaccccagcgacatcgccgtggagtgggagagcaacggccagcccgagaacaactacaagaccaccccccctgtgctggacagcgatggcagcttcttcctgtacagcaagctgaccgtggacaagagcagatggcagcagggcaacgtgttcagctgcagcgtgatgcacgaggccctgcacaatcactacacccagaagagcctgagcctgtcccctggcaagtga

SEQ ID NO: 217 - DNA, 1026 bp, Artificial Sequence
  Synthetic
gacatcctgatgacccagagccccagcagcctgagcgcctctgtgggcgatagagtgaccatcacctgcagagccagccaggccatcgacagctacctgcactggtatcagcagaagcctggcaaggcccctaagctgctgatctacagcgccagcaatctggagaccggcgtgcctagcagattcagcggcagcggctccggcaccgacttcaccctgaccatcagcagcctgctgcctgaggatttcgccacctactactgccagcaggtggtgtggagacctttcaccttcggccagggcaccaaggtggagatcaagcgggtggagcccaagagcagcgataagacccacacctgccccccctgccctgcccccgagctgctgggcggacccagcgtgttcctgttcccccccaagcctaaggacaccctgatgatcagcagaacccccgaggtgacctgcgtggtggtggatgtgagccacgaggaccctgaggtgaagttcaactggtacgtggacggcgtggaggtgcacaatgccaagaccaagcccagggaggagcagtacaacagcacctaccgggtggtgtccgtgctgaccgtgctgcaccaggattggctgaacggcaaggagtacaagtgcaaggtgtccaacaaggccctgcctgcccctatcgagaaaaccatcagcaaggccaagggccagcccagagagccccaggtgtacaccctgccccctagcagagatgagctgaccaagaaccaggtgtccctgacctgcctggtgaagggcttctaccccagcgacatcgccgtggagtgggagagcaacggccagcccgagaacaactacaagaccaccccccctgtgctggacagcgatggcagcttcttcctgtacagcaagctgaccgtggacaagagcagatggcagcagggcaacgtgttcagctgcagcgtgatgcacgaggccctgcacaatcactacacccagaagagcctgagcctgtcccctggcaagtga

SEQ ID NO: 218 - DNA, 1026 bp, Artificial Sequence
  Synthetic
gacatcgacatgacccagagccccagcagcctgagcgcctctgtgggcgatagagtgaccatcacctgcagagccagccaggccatcgacagctacctgcactggtatcagcagaagcctggcaaggcccctaagctgctgatctacagcgccagcaatctggagaccggcgtgcctagcagattcagcggcagcggctccggcaccgacttcaccctgaccatcagcagcctgctgcctgaggatttcgccacctactactgccagcaggtggtgtggagacctttcaccttcggccagggcaccaaggtggagatcaagcgggtggagcccaagagcagcgataagacccacacctgccccccctgccctgcccccgagctgctgggcggacccagcgtgttcctgttcccccccaagcctaaggacaccctgatgatcagcagaacccccgaggtgacctgcgtggtggtggatgtgagccacgaggaccctgaggtgaagttcaactggtacgtggacggcgtggaggtgcacaatgccaagaccaagcccagggaggagcagtacaacagcacctaccgggtggtgtccgtgctgaccgtgctgcaccaggattggctgaacggcaaggagtacaagtgcaaggtgtccaacaaggccctgcctgcccctatcgagaaaaccatcagcaaggccaagggccagcccagagagccccaggtgtacaccctgccccctagcagagatgagctgaccaagaaccaggtgtccctgacctgcctggtgaagggcttctaccccagcgacatcgccgtggagtgggagagcaacggccagcccgagaacaactacaagaccaccccccctgtgctggacagcgatggcagcttcttcctgtacagcaagctgaccgtggacaagagcagatggcagcagggcaacgtgttcagctgcagcgtgatgcacgaggccctgcacaatcactacacccagaagagcctgagcctgtcccctggcaagtga

SEQ ID NO: 219 - DNA, 1026 bp, Artificial Sequence
  Synthetic
gacatccacatgacccagagccccagcagcctgagcgcctctgtgggcgatagagtgaccatcacctgcagagccagccaggccatcgacagctacctgcactggtatcagcagaagcctggcaaggcccctaagctgctgatctacagcgccagcaatctggagaccggcgtgcctagcagattcagcggcagcggctccggcaccgacttcaccctgaccatcagcagcctgctgcctgaggatttcgccacctactactgccagcaggtggtgtggagacctttcaccttcggccagggcaccaaggtggagatcaagcgggtggagcccaagagcagcgataagacccacacctgccccccctgccctgcccccgagctgctgggcggacccagcgtgttcctgttcccccccaagcctaaggacaccctgatgatcagcagaacccccgaggtgacctgcgtggtggtggatgtgagccacgaggaccctgaggtgaagttcaactggtacgtggacggcgtggaggtgcacaatgccaagaccaagcccagggaggagcagtacaacagcacctaccgggtggtgtccgtgctgaccgtgctgcaccaggattggctgaacggcaaggagtacaagtgcaaggtgtccaacaaggccctgcctgcccctatcgagaaaaccatcagcaaggccaagggccagcccagagagccccaggtgtacaccctgccccctagcagagatgagctgaccaagaaccaggtgtccctgacctgcctggtgaagggcttctaccccagcgacatcgccgtggagtgggagagcaacggccagcccgagaacaactacaagaccaccccccctgtgctggacagcgatggcagcttcttcctgtacagcaagctgaccgtggacaagagcagatggcagcagggcaacgtgttcagctgcagcgtgatgcacgaggccctgcacaatcactacacccagaagagcctgagcctgtcccctggcaagtga

SEQ ID NO: 220 - DNA, 1026 bp, Artificial Sequence
  Synthetic
gacatccccatgacccagagccccagcagcctgagcgcctctgtgggcgatagagtgaccatcacctgcagagccagccaggccatcgacagctacctgcactggtatcagcagaagcctggcaaggcccctaagctgctgatctacagcgccagcaatctggagaccggcgtgcctagcagattcagcggcagcggctccggcaccgacttcaccctgaccatcagcagcctgctgcctgaggatttcgccacctactactgccagcaggtggtgtggagacctttcaccttcggccagggcaccaaggtggagatcaagcgggtggagcccaagagcagcgataagacccacacctgccccccctgccctgcccccgagctgctgggcggacccagcgtgttcctgttcccccccaagcctaaggacaccctgatgatcagcagaacccccgaggtgacctgcgtggtggtggatgtgagccacgaggaccctgaggtgaagttcaactggtacgtggacggcgtggaggtgcacaatgccaagaccaagcccagggaggagcagtacaacagcacctaccgggtggtgtccgtgctgaccgtgctgcaccaggattggctgaacggcaaggagtacaagtgcaaggtgtccaacaaggccctgcctgcccctatcgagaaaaccatcagcaaggccaagggccagcccagagagccccaggtgtacaccctgccccctagcagagatgagctgaccaagaaccaggtgtccctgacctgcctggtgaagggcttctaccccagcgacatcgccgtggagtgggagagcaacggccagcccgagaacaactacaagaccaccccccctgtgctggacagcgatggcagcttcttcctgtacagcaagctgaccgtggacaagagcagatggcagcagggcaacgtgttcagctgcagcgtgatgcacgaggccctgcacaatcactacacccagaagagcctgagcctgtcccctggcaagtga

SEQ ID NO: 221 - DNA, 1026 bp, Artificial Sequence
  Synthetic
gacatcaagatgacccagagccccagcagcctgagcgcctctgtgggcgatagagtgaccatcacctgcagagccagccaggccatcgacagctacctgcactggtatcagcagaagcctggcaaggcccctaagctgctgatctacagcgccagcaatctggagaccggcgtgcctagcagattcagcggcagcggctccggcaccgacttcaccctgaccatcagcagcctgctgcctgaggatttcgccacctactactgccagcaggtggtgtggagacctttcaccttcggccagggcaccaaggtggagatcaagcgggtggagcccaagagcagcgataagacccacacctgccccccctgccctgcccccgagctgctgggcggacccagcgtgttcctgttcccccccaagcctaaggacaccctgatgatcagcagaacccccgaggtgacctgcgtggtggtggatgtgagccacgaggaccctgaggtgaagttcaactggtacgtggacggcgtggaggtgcacaatgccaagaccaagcccagggaggagcagtacaacagcacctaccgggtggtgtccgtgctgaccgtgctgcaccaggattggctgaacggcaaggagtacaagtgcaaggtgtccaacaaggccctgcctgcccctatcgagaaaaccatcagcaaggccaagggccagcccagagagccccaggtgtacaccctgccccctagcagagatgagctgaccaagaaccaggtgtccctgacctgcctggtgaagggcttctaccccagcgacatcgccgtggagtgggagagcaacggccagcccgagaacaactacaagaccaccccccctgtgctggacagcgatggcagcttcttcctgtacagcaagctgaccgtggacaagagcagatggcagcagggcaacgtgttcagctgcagcgtgatgcacgaggccctgcacaatcactacacccagaagagcctgagcctgtcccctggcaagtga

SEQ ID NO: 222 - DNA, 1026 bp, Artificial Sequence
  Synthetic
gacatccagagcacccagagccccagcagcctgagcgcctctgtgggcgatagagtgaccatcacctgcagagccagccaggccatcgacagctacctgcactggtatcagcagaagcctggcaaggcccctaagctgctgatctacagcgccagcaatctggagaccggcgtgcctagcagattcagcggcagcggctccggcaccgacttcaccctgaccatcagcagcctgctgcctgaggatttcgccacctactactgccagcaggtggtgtggagacctttcaccttcggccagggcaccaaggtggagatcaagcgggtggagcccaagagcagcgataagacccacacctgccccccctgccctgcccccgagctgctgggcggacccagcgtgttcctgttcccccccaagcctaaggacaccctgatgatcagcagaacccccgaggtgacctgcgtggtggtggatgtgagccacgaggaccctgaggtgaagttcaactggtacgtggacggcgtggaggtgcacaatgccaagaccaagcccagggaggagcagtacaacagcacctaccgggtggtgtccgtgctgaccgtgctgcaccaggattggctgaacggcaaggagtacaagtgcaaggtgtccaacaaggccctgcctgcccctatcgagaaaaccatcagcaaggccaagggccagcccagagagccccaggtgtacaccctgccccctagcagagatgagctgaccaagaaccaggtgtccctgacctgcctggtgaagggcttctaccccagcgacatcgccgtggagtgggagagcaacggccagcccgagaacaactacaagaccaccccccctgtgctggacagcgatggcagcttcttcctgtacagcaagctgaccgtggacaagagcagatggcagcagggcaacgtgttcagctgcagcgtgatgcacgaggccctgcacaatcactacacccagaagagcctgagcctgtcccctggcaagtga

SEQ ID NO: 223 - DNA, 1026 bp, Artificial Sequence
  Synthetic
gacatccagtacacccagagccccagcagcctgagcgcctctgtgggcgatagagtgaccatcacctgcagagccagccaggccatcgacagctacctgcactggtatcagcagaagcctggcaaggcccctaagctgctgatctacagcgccagcaatctggagaccggcgtgcctagcagattcagcggcagcggctccggcaccgacttcaccctgaccatcagcagcctgctgcctgaggatttcgccacctactactgccagcaggtggtgtggagacctttcaccttcggccagggcaccaaggtggagatcaagcgggtggagcccaagagcagcgataagacccacacctgccccccctgccctgcccccgagctgctgggcggacccagcgtgttcctgttcccccccaagcctaaggacaccctgatgatcagcagaacccccgaggtgacctgcgtggtggtggatgtgagccacgaggaccctgaggtgaagttcaactggtacgtggacggcgtggaggtgcacaatgccaagaccaagcccagggaggagcagtacaacagcacctaccgggtggtgtccgtgctgaccgtgctgcaccaggattggctgaacggcaaggagtacaagtgcaaggtgtccaacaaggccctgcctgcccctatcgagaaaaccatcagcaaggccaagggccagcccagagagccccaggtgtacaccctgccccctagcagagatgagctgaccaagaaccaggtgtccctgacctgcctggtgaagggcttctaccccagcgacatcgccgtggagtgggagagcaacggccagcccgagaacaactacaagaccaccccccctgtgctggacagcgatggcagcttcttcctgtacagcaagctgaccgtggacaagagcagatggcagcagggcaacgtgttcagctgcagcgtgatgcacgaggccctgcacaatcactacacccagaagagcctgagcctgtcccctggcaagtga

SEQ ID NO: 224 - DNA, 1026 bp, Artificial Sequence
  Synthetic
gacatccaggacacccagagccccagcagcctgagcgcctctgtgggcgatagagtgaccatcacctgcagagccagccaggccatcgacagctacctgcactggtatcagcagaagcctggcaaggcccctaagctgctgatctacagcgccagcaatctggagaccggcgtgcctagcagattcagcggcagcggctccggcaccgacttcaccctgaccatcagcagcctgctgcctgaggatttcgccacctactactgccagcaggtggtgtggagacctttcaccttcggccagggcaccaaggtggagatcaagcgggtggagcccaagagcagcgataagacccacacctgccccccctgccctgcccccgagctgctgggcggacccagcgtgttcctgttcccccccaagcctaaggacaccctgatgatcagcagaacccccgaggtgacctgcgtggtggtggatgtgagccacgaggaccctgaggtgaagttcaactggtacgtggacggcgtggaggtgcacaatgccaagaccaagcccagggaggagcagtacaacagcacctaccgggtggtgtccgtgctgaccgtgctgcaccaggattggctgaacggcaaggagtacaagtgcaaggtgtccaacaaggccctgcctgcccctatcgagaaaaccatcagcaaggccaagggccagcccagagagccccaggtgtacaccctgccccctagcagagatgagctgaccaagaaccaggtgtccctgacctgcctggtgaagggcttctaccccagcgacatcgccgtggagtgggagagcaacggccagcccgagaacaactacaagaccaccccccctgtgctggacagcgatggcagcttcttcctgtacagcaagctgaccgtggacaagagcagatggcagcagggcaacgtgttcagctgcagcgtgatgcacgaggccctgcacaatcactacacccagaagagcctgagcctgtcccctggcaagtga

SEQ ID NO: 225 - DNA, 1026 bp, Artificial Sequence
  Synthetic
gacatccagcagacccagagccccagcagcctgagcgcctctgtgggcgatagagtgaccatcacctgcagagccagccaggccatcgacagctacctgcactggtatcagcagaagcctggcaaggcccctaagctgctgatctacagcgccagcaatctggagaccggcgtgcctagcagattcagcggcagcggctccggcaccgacttcaccctgaccatcagcagcctgctgcctgaggatttcgccacctactactgccagcaggtggtgtggagacctttcaccttcggccagggcaccaaggtggagatcaagcgggtggagcccaagagcagcgataagacccacacctgccccccctgccctgcccccgagctgctgggcggacccagcgtgttcctgttcccccccaagcctaaggacaccctgatgatcagcagaacccccgaggtgacctgcgtggtggtggatgtgagccacgaggaccctgaggtgaagttcaactggtacgtggacggcgtggaggtgcacaatgccaagaccaagcccagggaggagcagtacaacagcacctaccgggtggtgtccgtgctgaccgtgctgcaccaggattggctgaacggcaaggagtacaagtgcaaggtgtccaacaaggccctgcctgcccctatcgagaaaaccatcagcaaggccaagggccagcccagagagccccaggtgtacaccctgccccctagcagagatgagctgaccaagaaccaggtgtccctgacctgcctggtgaagggcttctaccccagcgacatcgccgtggagtgggagagcaacggccagcccgagaacaactacaagaccaccccccctgtgctggacagcgatggcagcttcttcctgtacagcaagctgaccgtggacaagagcagatggcagcagggcaacgtgttcagctgcagcgtgatgcacgaggccctgcacaatcactacacccagaagagcctgagcctgtcccctggcaagtga

SEQ ID NO: 226 - DNA, 1026 bp, Artificial Sequence
  Synthetic
gacatccagcacacccagagccccagcagcctgagcgcctctgtgggcgatagagtgaccatcacctgcagagccagccaggccatcgacagctacctgcactggtatcagcagaagcctggcaaggcccctaagctgctgatctacagcgccagcaatctggagaccggcgtgcctagcagattcagcggcagcggctccggcaccgacttcaccctgaccatcagcagcctgctgcctgaggatttcgccacctactactgccagcaggtggtgtggagacctttcaccttcggccagggcaccaaggtggagatcaagcgggtggagcccaagagcagcgataagacccacacctgccccccctgccctgcccccgagctgctgggcggacccagcgtgttcctgttcccccccaagcctaaggacaccctgatgatcagcagaacccccgaggtgacctgcgtggtggtggatgtgagccacgaggaccctgaggtgaagttcaactggtacgtggacggcgtggaggtgcacaatgccaagaccaagcccagggaggagcagtacaacagcacctaccgggtggtgtccgtgctgaccgtgctgcaccaggattggctgaacggcaaggagtacaagtgcaaggtgtccaacaaggccctgcctgcccctatcgagaaaaccatcagcaaggccaagggccagcccagagagccccaggtgtacaccctgccccctagcagagatgagctgaccaagaaccaggtgtccctgacctgcctggtgaagggcttctaccccagcgacatcgccgtggagtgggagagcaacggccagcccgagaacaactacaagaccaccccccctgtgctggacagcgatggcagcttcttcctgtacagcaagctgaccgtggacaagagcagatggcagcagggcaacgtgttcagctgcagcgtgatgcacgaggccctgcacaatcactacacccagaagagcctgagcctgtcccctggcaagtga

SEQ ID NO: 227 - DNA, 1026 bp, Artificial Sequence
  Synthetic
gacatccagcccacccagagccccagcagcctgagcgcctctgtgggcgatagagtgaccatcacctgcagagccagccaggccatcgacagctacctgcactggtatcagcagaagcctggcaaggcccctaagctgctgatctacagcgccagcaatctggagaccggcgtgcctagcagattcagcggcagcggctccggcaccgacttcaccctgaccatcagcagcctgctgcctgaggatttcgccacctactactgccagcaggtggtgtggagacctttcaccttcggccagggcaccaaggtggagatcaagcgggtggagcccaagagcagcgataagacccacacctgccccccctgccctgcccccgagctgctgggcggacccagcgtgttcctgttcccccccaagcctaaggacaccctgatgatcagcagaacccccgaggtgacctgcgtggtggtggatgtgagccacgaggaccctgaggtgaagttcaactggtacgtggacggcgtggaggtgcacaatgccaagaccaagcccagggaggagcagtacaacagcacctaccgggtggtgtccgtgctgaccgtgctgcaccaggattggctgaacggcaaggagtacaagtgcaaggtgtccaacaaggccctgcctgcccctatcgagaaaaccatcagcaaggccaagggccagcccagagagccccaggtgtacaccctgccccctagcagagatgagctgaccaagaaccaggtgtccctgacctgcctggtgaagggcttctaccccagcgacatcgccgtggagtgggagagcaacggccagcccgagaacaactacaagaccaccccccctgtgctggacagcgatggcagcttcttcctgtacagcaagctgaccgtggacaagagcagatggcagcagggcaacgtgttcagctgcagcgtgatgcacgaggccctgcacaatcactacacccagaagagcctgagcctgtcccctggcaagtga

SEQ ID NO: 228 - DNA, 1026 bp, Artificial Sequence
  Synthetic
gacatccagaagacccagagccccagcagcctgagcgcctctgtgggcgatagagtgaccatcacctgcagagccagccaggccatcgacagctacctgcactggtatcagcagaagcctggcaaggcccctaagctgctgatctacagcgccagcaatctggagaccggcgtgcctagcagattcagcggcagcggctccggcaccgacttcaccctgaccatcagcagcctgctgcctgaggatttcgccacctactactgccagcaggtggtgtggagacctttcaccttcggccagggcaccaaggtggagatcaagcgggtggagcccaagagcagcgataagacccacacctgccccccctgccctgcccccgagctgctgggcggacccagcgtgttcctgttcccccccaagcctaaggacaccctgatgatcagcagaacccccgaggtgacctgcgtggtggtggatgtgagccacgaggaccctgaggtgaagttcaactggtacgtggacggcgtggaggtgcacaatgccaagaccaagcccagggaggagcagtacaacagcacctaccgggtggtgtccgtgctgaccgtgctgcaccaggattggctgaacggcaaggagtacaagtgcaaggtgtccaacaaggccctgcctgcccctatcgagaaaaccatcagcaaggccaagggccagcccagagagccccaggtgtacaccctgccccctagcagagatgagctgaccaagaaccaggtgtccctgacctgcctggtgaagggcttctaccccagcgacatcgccgtggagtgggagagcaacggccagcccgagaacaactacaagaccaccccccctgtgctggacagcgatggcagcttcttcctgtacagcaagctgaccgtggacaagagcagatggcagcagggcaacgtgttcagctgcagcgtgatgcacgaggccctgcacaatcactacacccagaagagcctgagcctgtcccctggcaagtga

SEQ ID NO: 229 - DNA, 1026 bp, Artificial Sequence
  Synthetic
gacatccagatgctgcagagccccagcagcctgagcgcctctgtgggcgatagagtgaccatcacctgcagagccagccaggccatcgacagctacctgcactggtatcagcagaagcctggcaaggcccctaagctgctgatctacagcgccagcaatctggagaccggcgtgcctagcagattcagcggcagcggctccggcaccgacttcaccctgaccatcagcagcctgctgcctgaggatttcgccacctactactgccagcaggtggtgtggagacctttcaccttcggccagggcaccaaggtggagatcaagcgggtggagcccaagagcagcgataagacccacacctgccccccctgccctgcccccgagctgctgggcggacccagcgtgttcctgttcccccccaagcctaaggacaccctgatgatcagcagaacccccgaggtgacctgcgtggtggtggatgtgagccacgaggaccctgaggtgaagttcaactggtacgtggacggcgtggaggtgcacaatgccaagaccaagcccagggaggagcagtacaacagcacctaccgggtggtgtccgtgctgaccgtgctgcaccaggattggctgaacggcaaggagtacaagtgcaaggtgtccaacaaggccctgcctgcccctatcgagaaaaccatcagcaaggccaagggccagcccagagagccccaggtgtacaccctgccccctagcagagatgagctgaccaagaaccaggtgtccctgacctgcctggtgaagggcttctaccccagcgacatcgccgtggagtgggagagcaacggccagcccgagaacaactacaagaccaccccccctgtgctggacagcgatggcagcttcttcctgtacagcaagctgaccgtggacaagagcagatggcagcagggcaacgtgttcagctgcagcgtgatgcacgaggccctgcacaatcactacacccagaagagcctgagcctgtcccctggcaagtga

SEQ ID NO: 230 - DNA, 1026 bp, Artificial Sequence
  Synthetic
gacatccagatggaccagagccccagcagcctgagcgcctctgtgggcgatagagtgaccatcacctgcagagccagccaggccatcgacagctacctgcactggtatcagcagaagcctggcaaggcccctaagctgctgatctacagcgccagcaatctggagaccggcgtgcctagcagattcagcggcagcggctccggcaccgacttcaccctgaccatcagcagcctgctgcctgaggatttcgccacctactactgccagcaggtggtgtggagacctttcaccttcggccagggcaccaaggtggagatcaagcgggtggagcccaagagcagcgataagacccacacctgccccccctgccctgcccccgagctgctgggcggacccagcgtgttcctgttcccccccaagcctaaggacaccctgatgatcagcagaacccccgaggtgacctgcgtggtggtggatgtgagccacgaggaccctgaggtgaagttcaactggtacgtggacggcgtggaggtgcacaatgccaagaccaagcccagggaggagcagtacaacagcacctaccgggtggtgtccgtgctgaccgtgctgcaccaggattggctgaacggcaaggagtacaagtgcaaggtgtccaacaaggccctgcctgcccctatcgagaaaaccatcagcaaggccaagggccagcccagagagccccaggtgtacaccctgccccctagcagagatgagctgaccaagaaccaggtgtccctgacctgcctggtgaagggcttctaccccagcgacatcgccgtggagtgggagagcaacggccagcccgagaacaactacaagaccaccccccctgtgctggacagcgatggcagcttcttcctgtacagcaagctgaccgtggacaagagcagatggcagcagggcaacgtgttcagctgcagcgtgatgcacgaggccctgcacaatcactacacccagaagagcctgagcctgtcccctggcaagtga

SEQ ID NO: 231 - DNA, 1026 bp, Artificial Sequence
  Synthetic
gacatccagatgcagcagagccccagcagcctgagcgcctctgtgggcgatagagtgaccatcacctgcagagccagccaggccatcgacagctacctgcactggtatcagcagaagcctggcaaggcccctaagctgctgatctacagcgccagcaatctggagaccggcgtgcctagcagattcagcggcagcggctccggcaccgacttcaccctgaccatcagcagcctgctgcctgaggatttcgccacctactactgccagcaggtggtgtggagacctttcaccttcggccagggcaccaaggtggagatcaagcgggtggagcccaagagcagcgataagacccacacctgccccccctgccctgcccccgagctgctgggcggacccagcgtgttcctgttcccccccaagcctaaggacaccctgatgatcagcagaacccccgaggtgacctgcgtggtggtggatgtgagccacgaggaccctgaggtgaagttcaactggtacgtggacggcgtggaggtgcacaatgccaagaccaagcccagggaggagcagtacaacagcacctaccgggtggtgtccgtgctgaccgtgctgcaccaggattggctgaacggcaaggagtacaagtgcaaggtgtccaacaaggccctgcctgcccctatcgagaaaaccatcagcaaggccaagggccagcccagagagccccaggtgtacaccctgccccctagcagagatgagctgaccaagaaccaggtgtccctgacctgcctggtgaagggcttctaccccagcgacatcgccgtggagtgggagagcaacggccagcccgagaacaactacaagaccaccccccctgtgctggacagcgatggcagcttcttcctgtacagcaagctgaccgtggacaagagcagatggcagcagggcaacgtgttcagctgcagcgtgatgcacgaggccctgcacaatcactacacccagaagagcctgagcctgtcccctggcaagtga

SEQ ID NO: 232 - DNA, 1026 bp, Artificial Sequence
  Synthetic
gacatccagatgcaccagagccccagcagcctgagcgcctctgtgggcgatagagtgaccatcacctgcagagccagccaggccatcgacagctacctgcactggtatcagcagaagcctggcaaggcccctaagctgctgatctacagcgccagcaatctggagaccggcgtgcctagcagattcagcggcagcggctccggcaccgacttcaccctgaccatcagcagcctgctgcctgaggatttcgccacctactactgccagcaggtggtgtggagacctttcaccttcggccagggcaccaaggtggagatcaagcgggtggagcccaagagcagcgataagacccacacctgccccccctgccctgcccccgagctgctgggcggacccagcgtgttcctgttcccccccaagcctaaggacaccctgatgatcagcagaacccccgaggtgacctgcgtggtggtggatgtgagccacgaggaccctgaggtgaagttcaactggtacgtggacggcgtggaggtgcacaatgccaagaccaagcccagggaggagcagtacaacagcacctaccgggtggtgtccgtgctgaccgtgctgcaccaggattggctgaacggcaaggagtacaagtgcaaggtgtccaacaaggccctgcctgcccctatcgagaaaaccatcagcaaggccaagggccagcccagagagccccaggtgtacaccctgccccctagcagagatgagctgaccaagaaccaggtgtccctgacctgcctggtgaagggcttctaccccagcgacatcgccgtggagtgggagagcaacggccagcccgagaacaactacaagaccaccccccctgtgctggacagcgatggcagcttcttcctgtacagcaagctgaccgtggacaagagcagatggcagcagggcaacgtgttcagctgcagcgtgatgcacgaggccctgcacaatcactacacccagaagagcctgagcctgtcccctggcaagtga

SEQ ID NO: 233 - DNA, 1026 bp, Artificial Sequence
  Synthetic
gacatccagatgccccagagccccagcagcctgagcgcctctgtgggcgatagagtgaccatcacctgcagagccagccaggccatcgacagctacctgcactggtatcagcagaagcctggcaaggcccctaagctgctgatctacagcgccagcaatctggagaccggcgtgcctagcagattcagcggcagcggctccggcaccgacttcaccctgaccatcagcagcctgctgcctgaggatttcgccacctactactgccagcaggtggtgtggagacctttcaccttcggccagggcaccaaggtggagatcaagcgggtggagcccaagagcagcgataagacccacacctgccccccctgccctgcccccgagctgctgggcggacccagcgtgttcctgttcccccccaagcctaaggacaccctgatgatcagcagaacccccgaggtgacctgcgtggtggtggatgtgagccacgaggaccctgaggtgaagttcaactggtacgtggacggcgtggaggtgcacaatgccaagaccaagcccagggaggagcagtacaacagcacctaccgggtggtgtccgtgctgaccgtgctgcaccaggattggctgaacggcaaggagtacaagtgcaaggtgtccaacaaggccctgcctgcccctatcgagaaaaccatcagcaaggccaagggccagcccagagagccccaggtgtacaccctgccccctagcagagatgagctgaccaagaaccaggtgtccctgacctgcctggtgaagggcttctaccccagcgacatcgccgtggagtgggagagcaacggccagcccgagaacaactacaagaccaccccccctgtgctggacagcgatggcagcttcttcctgtacagcaagctgaccgtggacaagagcagatggcagcagggcaacgtgttcagctgcagcgtgatgcacgaggccctgcacaatcactacacccagaagagcctgagcctgtcccctggcaagtga

SEQ ID NO: 234 - DNA, 1026 bp, Artificial Sequence
  Synthetic
gacatccagatgaagcagagccccagcagcctgagcgcctctgtgggcgatagagtgaccatcacctgcagagccagccaggccatcgacagctacctgcactggtatcagcagaagcctggcaaggcccctaagctgctgatctacagcgccagcaatctggagaccggcgtgcctagcagattcagcggcagcggctccggcaccgacttcaccctgaccatcagcagcctgctgcctgaggatttcgccacctactactgccagcaggtggtgtggagacctttcaccttcggccagggcaccaaggtggagatcaagcgggtggagcccaagagcagcgataagacccacacctgccccccctgccctgcccccgagctgctgggcggacccagcgtgttcctgttcccccccaagcctaaggacaccctgatgatcagcagaacccccgaggtgacctgcgtggtggtggatgtgagccacgaggaccctgaggtgaagttcaactggtacgtggacggcgtggaggtgcacaatgccaagaccaagcccagggaggagcagtacaacagcacctaccgggtggtgtccgtgctgaccgtgctgcaccaggattggctgaacggcaaggagtacaagtgcaaggtgtccaacaaggccctgcctgcccctatcgagaaaaccatcagcaaggccaagggccagcccagagagccccaggtgtacaccctgccccctagcagagatgagctgaccaagaaccaggtgtccctgacctgcctggtgaagggcttctaccccagcgacatcgccgtggagtgggagagcaacggccagcccgagaacaactacaagaccaccccccctgtgctggacagcgatggcagcttcttcctgtacagcaagctgaccgtggacaagagcagatggcagcagggcaacgtgttcagctgcagcgtgatgcacgaggccctgcacaatcactacacccagaagagcctgagcctgtcccctggcaagtga

SEQ ID NO: 235 - DNA, 1026 bp, Artificial Sequence
  Synthetic
gacatccagatgaccagcagccccagcagcctgagcgcctctgtgggcgatagagtgaccatcacctgcagagccagccaggccatcgacagctacctgcactggtatcagcagaagcctggcaaggcccctaagctgctgatctacagcgccagcaatctggagaccggcgtgcctagcagattcagcggcagcggctccggcaccgacttcaccctgaccatcagcagcctgctgcctgaggatttcgccacctactactgccagcaggtggtgtggagacctttcaccttcggccagggcaccaaggtggagatcaagcgggtggagcccaagagcagcgataagacccacacctgccccccctgccctgcccccgagctgctgggcggacccagcgtgttcctgttcccccccaagcctaaggacaccctgatgatcagcagaacccccgaggtgacctgcgtggtggtggatgtgagccacgaggaccctgaggtgaagttcaactggtacgtggacggcgtggaggtgcacaatgccaagaccaagcccagggaggagcagtacaacagcacctaccgggtggtgtccgtgctgaccgtgctgcaccaggattggctgaacggcaaggagtacaagtgcaaggtgtccaacaaggccctgcctgcccctatcgagaaaaccatcagcaaggccaagggccagcccagagagccccaggtgtacaccctgccccctagcagagatgagctgaccaagaaccaggtgtccctgacctgcctggtgaagggcttctaccccagcgacatcgccgtggagtgggagagcaacggccagcccgagaacaactacaagaccaccccccctgtgctggacagcgatggcagcttcttcctgtacagcaagctgaccgtggacaagagcagatggcagcagggcaacgtgttcagctgcagcgtgatgcacgaggccctgcacaatcactacacccagaagagcctgagcctgtcccctggcaagtga

SEQ ID NO: 236 - DNA, 1026 bp, Artificial Sequence
  Synthetic
gacatccagatgaccctgagccccagcagcctgagcgcctctgtgggcgatagagtgaccatcacctgcagagccagccaggccatcgacagctacctgcactggtatcagcagaagcctggcaaggcccctaagctgctgatctacagcgccagcaatctggagaccggcgtgcctagcagattcagcggcagcggctccggcaccgacttcaccctgaccatcagcagcctgctgcctgaggatttcgccacctactactgccagcaggtggtgtggagacctttcaccttcggccagggcaccaaggtggagatcaagcgggtggagcccaagagcagcgataagacccacacctgccccccctgccctgcccccgagctgctgggcggacccagcgtgttcctgttcccccccaagcctaaggacaccctgatgatcagcagaacccccgaggtgacctgcgtggtggtggatgtgagccacgaggaccctgaggtgaagttcaactggtacgtggacggcgtggaggtgcacaatgccaagaccaagcccagggaggagcagtacaacagcacctaccgggtggtgtccgtgctgaccgtgctgcaccaggattggctgaacggcaaggagtacaagtgcaaggtgtccaacaaggccctgcctgcccctatcgagaaaaccatcagcaaggccaagggccagcccagagagccccaggtgtacaccctgccccctagcagagatgagctgaccaagaaccaggtgtccctgacctgcctggtgaagggcttctaccccagcgacatcgccgtggagtgggagagcaacggccagcccgagaacaactacaagaccaccccccctgtgctggacagcgatggcagcttcttcctgtacagcaagctgaccgtggacaagagcagatggcagcagggcaacgtgttcagctgcagcgtgatgcacgaggccctgcacaatcactacacccagaagagcctgagcctgtcccctggcaagtga

SEQ ID NO: 237 - DNA, 1026 bp, Artificial Sequence
  Synthetic
gacatccagatgaccgacagccccagcagcctgagcgcctctgtgggcgatagagtgaccatcacctgcagagccagccaggccatcgacagctacctgcactggtatcagcagaagcctggcaaggcccctaagctgctgatctacagcgccagcaatctggagaccggcgtgcctagcagattcagcggcagcggctccggcaccgacttcaccctgaccatcagcagcctgctgcctgaggatttcgccacctactactgccagcaggtggtgtggagacctttcaccttcggccagggcaccaaggtggagatcaagcgggtggagcccaagagcagcgataagacccacacctgccccccctgccctgcccccgagctgctgggcggacccagcgtgttcctgttcccccccaagcctaaggacaccctgatgatcagcagaacccccgaggtgacctgcgtggtggtggatgtgagccacgaggaccctgaggtgaagttcaactggtacgtggacggcgtggaggtgcacaatgccaagaccaagcccagggaggagcagtacaacagcacctaccgggtggtgtccgtgctgaccgtgctgcaccaggattggctgaacggcaaggagtacaagtgcaaggtgtccaacaaggccctgcctgcccctatcgagaaaaccatcagcaaggccaagggccagcccagagagccccaggtgtacaccctgccccctagcagagatgagctgaccaagaaccaggtgtccctgacctgcctggtgaagggcttctaccccagcgacatcgccgtggagtgggagagcaacggccagcccgagaacaactacaagaccaccccccctgtgctggacagcgatggcagcttcttcctgtacagcaagctgaccgtggacaagagcagatggcagcagggcaacgtgttcagctgcagcgtgatgcacgaggccctgcacaatcactacacccagaagagcctgagcctgtcccctggcaagtga

SEQ ID NO: 238 - DNA, 1026 bp, Artificial Sequence
  Synthetic
gacatccagatgacccacagccccagcagcctgagcgcctctgtgggcgatagagtgaccatcacctgcagagccagccaggccatcgacagctacctgcactggtatcagcagaagcctggcaaggcccctaagctgctgatctacagcgccagcaatctggagaccggcgtgcctagcagattcagcggcagcggctccggcaccgacttcaccctgaccatcagcagcctgctgcctgaggatttcgccacctactactgccagcaggtggtgtggagacctttcaccttcggccagggcaccaaggtggagatcaagcgggtggagcccaagagcagcgataagacccacacctgccccccctgccctgcccccgagctgctgggcggacccagcgtgttcctgttcccccccaagcctaaggacaccctgatgatcagcagaacccccgaggtgacctgcgtggtggtggatgtgagccacgaggaccctgaggtgaagttcaactggtacgtggacggcgtggaggtgcacaatgccaagaccaagcccagggaggagcagtacaacagcacctaccgggtggtgtccgtgctgaccgtgctgcaccaggattggctgaacggcaaggagtacaagtgcaaggtgtccaacaaggccctgcctgcccctatcgagaaaaccatcagcaaggccaagggccagcccagagagccccaggtgtacaccctgccccctagcagagatgagctgaccaagaaccaggtgtccctgacctgcctggtgaagggcttctaccccagcgacatcgccgtggagtgggagagcaacggccagcccgagaacaactacaagaccaccccccctgtgctggacagcgatggcagcttcttcctgtacagcaagctgaccgtggacaagagcagatggcagcagggcaacgtgttcagctgcagcgtgatgcacgaggccctgcacaatcactacacccagaagagcctgagcctgtcccctggcaagtga

SEQ ID NO: 239 - DNA, 1026 bp, Artificial Sequence
  Synthetic
gacatccagatgacccccagccccagcagcctgagcgcctctgtgggcgatagagtgaccatcacctgcagagccagccaggccatcgacagctacctgcactggtatcagcagaagcctggcaaggcccctaagctgctgatctacagcgccagcaatctggagaccggcgtgcctagcagattcagcggcagcggctccggcaccgacttcaccctgaccatcagcagcctgctgcctgaggatttcgccacctactactgccagcaggtggtgtggagacctttcaccttcggccagggcaccaaggtggagatcaagcgggtggagcccaagagcagcgataagacccacacctgccccccctgccctgcccccgagctgctgggcggacccagcgtgttcctgttcccccccaagcctaaggacaccctgatgatcagcagaacccccgaggtgacctgcgtggtggtggatgtgagccacgaggaccctgaggtgaagttcaactggtacgtggacggcgtggaggtgcacaatgccaagaccaagcccagggaggagcagtacaacagcacctaccgggtggtgtccgtgctgaccgtgctgcaccaggattggctgaacggcaaggagtacaagtgcaaggtgtccaacaaggccctgcctgcccctatcgagaaaaccatcagcaaggccaagggccagcccagagagccccaggtgtacaccctgccccctagcagagatgagctgaccaagaaccaggtgtccctgacctgcctggtgaagggcttctaccccagcgacatcgccgtggagtgggagagcaacggccagcccgagaacaactacaagaccaccccccctgtgctggacagcgatggcagcttcttcctgtacagcaagctgaccgtggacaagagcagatggcagcagggcaacgtgttcagctgcagcgtgatgcacgaggccctgcacaatcactacacccagaagagcctgagcctgtcccctggcaagtga

SEQ ID NO: 240 - DNA, 1026 bp, Artificial Sequence
  Synthetic
gacatccagatgaccaagagccccagcagcctgagcgcctctgtgggcgatagagtgaccatcacctgcagagccagccaggccatcgacagctacctgcactggtatcagcagaagcctggcaaggcccctaagctgctgatctacagcgccagcaatctggagaccggcgtgcctagcagattcagcggcagcggctccggcaccgacttcaccctgaccatcagcagcctgctgcctgaggatttcgccacctactactgccagcaggtggtgtggagacctttcaccttcggccagggcaccaaggtggagatcaagcgggtggagcccaagagcagcgataagacccacacctgccccccctgccctgcccccgagctgctgggcggacccagcgtgttcctgttcccccccaagcctaaggacaccctgatgatcagcagaacccccgaggtgacctgcgtggtggtggatgtgagccacgaggaccctgaggtgaagttcaactggtacgtggacggcgtggaggtgcacaatgccaagaccaagcccagggaggagcagtacaacagcacctaccgggtggtgtccgtgctgaccgtgctgcaccaggattggctgaacggcaaggagtacaagtgcaaggtgtccaacaaggccctgcctgcccctatcgagaaaaccatcagcaaggccaagggccagcccagagagccccaggtgtacaccctgccccctagcagagatgagctgaccaagaaccaggtgtccctgacctgcctggtgaagggcttctaccccagcgacatcgccgtggagtgggagagcaacggccagcccgagaacaactacaagaccaccccccctgtgctggacagcgatggcagcttcttcctgtacagcaagctgaccgtggacaagagcagatggcagcagggcaacgtgttcagctgcagcgtgatgcacgaggccctgcacaatcactacacccagaagagcctgagcctgtcccctggcaagtga

SEQ ID NO: 241 - DNA, 1026 bp, Artificial Sequence
  Synthetic
gacatccagatgacccagctgcccagcagcctgagcgcctctgtgggcgatagagtgaccatcacctgcagagccagccaggccatcgacagctacctgcactggtatcagcagaagcctggcaaggcccctaagctgctgatctacagcgccagcaatctggagaccggcgtgcctagcagattcagcggcagcggctccggcaccgacttcaccctgaccatcagcagcctgctgcctgaggatttcgccacctactactgccagcaggtggtgtggagacctttcaccttcggccagggcaccaaggtggagatcaagcgggtggagcccaagagcagcgataagacccacacctgccccccctgccctgcccccgagctgctgggcggacccagcgtgttcctgttcccccccaagcctaaggacaccctgatgatcagcagaacccccgaggtgacctgcgtggtggtggatgtgagccacgaggaccctgaggtgaagttcaactggtacgtggacggcgtggaggtgcacaatgccaagaccaagcccagggaggagcagtacaacagcacctaccgggtggtgtccgtgctgaccgtgctgcaccaggattggctgaacggcaaggagtacaagtgcaaggtgtccaacaaggccctgcctgcccctatcgagaaaaccatcagcaaggccaagggccagcccagagagccccaggtgtacaccctgccccctagcagagatgagctgaccaagaaccaggtgtccctgacctgcctggtgaagggcttctaccccagcgacatcgccgtggagtgggagagcaacggccagcccgagaacaactacaagaccaccccccctgtgctggacagcgatggcagcttcttcctgtacagcaagctgaccgtggacaagagcagatggcagcagggcaacgtgttcagctgcagcgtgatgcacgaggccctgcacaatcactacacccagaagagcctgagcctgtcccctggcaagtga

SEQ ID NO: 242 - DNA, 1026 bp, Artificial Sequence
  Synthetic
gacatccagatgacccaggaccccagcagcctgagcgcctctgtgggcgatagagtgaccatcacctgcagagccagccaggccatcgacagctacctgcactggtatcagcagaagcctggcaaggcccctaagctgctgatctacagcgccagcaatctggagaccggcgtgcctagcagattcagcggcagcggctccggcaccgacttcaccctgaccatcagcagcctgctgcctgaggatttcgccacctactactgccagcaggtggtgtggagacctttcaccttcggccagggcaccaaggtggagatcaagcgggtggagcccaagagcagcgataagacccacacctgccccccctgccctgcccccgagctgctgggcggacccagcgtgttcctgttcccccccaagcctaaggacaccctgatgatcagcagaacccccgaggtgacctgcgtggtggtggatgtgagccacgaggaccctgaggtgaagttcaactggtacgtggacggcgtggaggtgcacaatgccaagaccaagcccagggaggagcagtacaacagcacctaccgggtggtgtccgtgctgaccgtgctgcaccaggattggctgaacggcaaggagtacaagtgcaaggtgtccaacaaggccctgcctgcccctatcgagaaaaccatcagcaaggccaagggccagcccagagagccccaggtgtacaccctgccccctagcagagatgagctgaccaagaaccaggtgtccctgacctgcctggtgaagggcttctaccccagcgacatcgccgtggagtgggagagcaacggccagcccgagaacaactacaagaccaccccccctgtgctggacagcgatggcagcttcttcctgtacagcaagctgaccgtggacaagagcagatggcagcagggcaacgtgttcagctgcagcgtgatgcacgaggccctgcacaatcactacacccagaagagcctgagcctgtcccctggcaagtga

SEQ ID NO: 243 - DNA, 1026 bp, Artificial Sequence
  Synthetic
gacatccagatgacccagcagcccagcagcctgagcgcctctgtgggcgatagagtgaccatcacctgcagagccagccaggccatcgacagctacctgcactggtatcagcagaagcctggcaaggcccctaagctgctgatctacagcgccagcaatctggagaccggcgtgcctagcagattcagcggcagcggctccggcaccgacttcaccctgaccatcagcagcctgctgcctgaggatttcgccacctactactgccagcaggtggtgtggagacctttcaccttcggccagggcaccaaggtggagatcaagcgggtggagcccaagagcagcgataagacccacacctgccccccctgccctgcccccgagctgctgggcggacccagcgtgttcctgttcccccccaagcctaaggacaccctgatgatcagcagaacccccgaggtgacctgcgtggtggtggatgtgagccacgaggaccctgaggtgaagttcaactggtacgtggacggcgtggaggtgcacaatgccaagaccaagcccagggaggagcagtacaacagcacctaccgggtggtgtccgtgctgaccgtgctgcaccaggattggctgaacggcaaggagtacaagtgcaaggtgtccaacaaggccctgcctgcccctatcgagaaaaccatcagcaaggccaagggccagcccagagagccccaggtgtacaccctgccccctagcagagatgagctgaccaagaaccaggtgtccctgacctgcctggtgaagggcttctaccccagcgacatcgccgtggagtgggagagcaacggccagcccgagaacaactacaagaccaccccccctgtgctggacagcgatggcagcttcttcctgtacagcaagctgaccgtggacaagagcagatggcagcagggcaacgtgttcagctgcagcgtgatgcacgaggccctgcacaatcactacacccagaagagcctgagcctgtcccctggcaagtga

SEQ ID NO: 244 - DNA, 1026 bp, Artificial Sequence
  Synthetic
gacatccagatgacccagcaccccagcagcctgagcgcctctgtgggcgatagagtgaccatcacctgcagagccagccaggccatcgacagctacctgcactggtatcagcagaagcctggcaaggcccctaagctgctgatctacagcgccagcaatctggagaccggcgtgcctagcagattcagcggcagcggctccggcaccgacttcaccctgaccatcagcagcctgctgcctgaggatttcgccacctactactgccagcaggtggtgtggagacctttcaccttcggccagggcaccaaggtggagatcaagcgggtggagcccaagagcagcgataagacccacacctgccccccctgccctgcccccgagctgctgggcggacccagcgtgttcctgttcccccccaagcctaaggacaccctgatgatcagcagaacccccgaggtgacctgcgtggtggtggatgtgagccacgaggaccctgaggtgaagttcaactggtacgtggacggcgtggaggtgcacaatgccaagaccaagcccagggaggagcagtacaacagcacctaccgggtggtgtccgtgctgaccgtgctgcaccaggattggctgaacggcaaggagtacaagtgcaaggtgtccaacaaggccctgcctgcccctatcgagaaaaccatcagcaaggccaagggccagcccagagagccccaggtgtacaccctgccccctagcagagatgagctgaccaagaaccaggtgtccctgacctgcctggtgaagggcttctaccccagcgacatcgccgtggagtgggagagcaacggccagcccgagaacaactacaagaccaccccccctgtgctggacagcgatggcagcttcttcctgtacagcaagctgaccgtggacaagagcagatggcagcagggcaacgtgttcagctgcagcgtgatgcacgaggccctgcacaatcactacacccagaagagcctgagcctgtcccctggcaagtga

SEQ ID NO: 245 - DNA, 1026 bp, Artificial Sequence
  Synthetic
gacatccagatgacccagccccccagcagcctgagcgcctctgtgggcgatagagtgaccatcacctgcagagccagccaggccatcgacagctacctgcactggtatcagcagaagcctggcaaggcccctaagctgctgatctacagcgccagcaatctggagaccggcgtgcctagcagattcagcggcagcggctccggcaccgacttcaccctgaccatcagcagcctgctgcctgaggatttcgccacctactactgccagcaggtggtgtggagacctttcaccttcggccagggcaccaaggtggagatcaagcgggtggagcccaagagcagcgataagacccacacctgccccccctgccctgcccccgagctgctgggcggacccagcgtgttcctgttcccccccaagcctaaggacaccctgatgatcagcagaacccccgaggtgacctgcgtggtggtggatgtgagccacgaggaccctgaggtgaagttcaactggtacgtggacggcgtggaggtgcacaatgccaagaccaagcccagggaggagcagtacaacagcacctaccgggtggtgtccgtgctgaccgtgctgcaccaggattggctgaacggcaaggagtacaagtgcaaggtgtccaacaaggccctgcctgcccctatcgagaaaaccatcagcaaggccaagggccagcccagagagccccaggtgtacaccctgccccctagcagagatgagctgaccaagaaccaggtgtccctgacctgcctggtgaagggcttctaccccagcgacatcgccgtggagtgggagagcaacggccagcccgagaacaactacaagaccaccccccctgtgctggacagcgatggcagcttcttcctgtacagcaagctgaccgtggacaagagcagatggcagcagggcaacgtgttcagctgcagcgtgatgcacgaggccctgcacaatcactacacccagaagagcctgagcctgtcccctggcaagtga

SEQ ID NO: 246 - DNA, 1026 bp, Artificial Sequence
  Synthetic
gacatccagatgacccagaagcccagcagcctgagcgcctctgtgggcgatagagtgaccatcacctgcagagccagccaggccatcgacagctacctgcactggtatcagcagaagcctggcaaggcccctaagctgctgatctacagcgccagcaatctggagaccggcgtgcctagcagattcagcggcagcggctccggcaccgacttcaccctgaccatcagcagcctgctgcctgaggatttcgccacctactactgccagcaggtggtgtggagacctttcaccttcggccagggcaccaaggtggagatcaagcgggtggagcccaagagcagcgataagacccacacctgccccccctgccctgcccccgagctgctgggcggacccagcgtgttcctgttcccccccaagcctaaggacaccctgatgatcagcagaacccccgaggtgacctgcgtggtggtggatgtgagccacgaggaccctgaggtgaagttcaactggtacgtggacggcgtggaggtgcacaatgccaagaccaagcccagggaggagcagtacaacagcacctaccgggtggtgtccgtgctgaccgtgctgcaccaggattggctgaacggcaaggagtacaagtgcaaggtgtccaacaaggccctgcctgcccctatcgagaaaaccatcagcaaggccaagggccagcccagagagccccaggtgtacaccctgccccctagcagagatgagctgaccaagaaccaggtgtccctgacctgcctggtgaagggcttctaccccagcgacatcgccgtggagtgggagagcaacggccagcccgagaacaactacaagaccaccccccctgtgctggacagcgatggcagcttcttcctgtacagcaagctgaccgtggacaagagcagatggcagcagggcaacgtgttcagctgcagcgtgatgcacgaggccctgcacaatcactacacccagaagagcctgagcctgtcccctggcaagtga

SEQ ID NO: 247 - DNA, 1026 bp, Artificial Sequence
  Synthetic
gacatccagatgacccagagcagcagcagcctgagcgcctctgtgggcgatagagtgaccatcacctgcagagccagccaggccatcgacagctacctgcactggtatcagcagaagcctggcaaggcccctaagctgctgatctacagcgccagcaatctggagaccggcgtgcctagcagattcagcggcagcggctccggcaccgacttcaccctgaccatcagcagcctgctgcctgaggatttcgccacctactactgccagcaggtggtgtggagacctttcaccttcggccagggcaccaaggtggagatcaagcgggtggagcccaagagcagcgataagacccacacctgccccccctgccctgcccccgagctgctgggcggacccagcgtgttcctgttcccccccaagcctaaggacaccctgatgatcagcagaacccccgaggtgacctgcgtggtggtggatgtgagccacgaggaccctgaggtgaagttcaactggtacgtggacggcgtggaggtgcacaatgccaagaccaagcccagggaggagcagtacaacagcacctaccgggtggtgtccgtgctgaccgtgctgcaccaggattggctgaacggcaaggagtacaagtgcaaggtgtccaacaaggccctgcctgcccctatcgagaaaaccatcagcaaggccaagggccagcccagagagccccaggtgtacaccctgccccctagcagagatgagctgaccaagaaccaggtgtccctgacctgcctggtgaagggcttctaccccagcgacatcgccgtggagtgggagagcaacggccagcccgagaacaactacaagaccaccccccctgtgctggacagcgatggcagcttcttcctgtacagcaagctgaccgtggacaagagcagatggcagcagggcaacgtgttcagctgcagcgtgatgcacgaggccctgcacaatcactacacccagaagagcctgagcctgtcccctggcaagtga

SEQ ID NO: 248 - DNA, 1026 bp, Artificial Sequence
  Synthetic
gacatccagatgacccagagcctgagcagcctgagcgcctctgtgggcgatagagtgaccatcacctgcagagccagccaggccatcgacagctacctgcactggtatcagcagaagcctggcaaggcccctaagctgctgatctacagcgccagcaatctggagaccggcgtgcctagcagattcagcggcagcggctccggcaccgacttcaccctgaccatcagcagcctgctgcctgaggatttcgccacctactactgccagcaggtggtgtggagacctttcaccttcggccagggcaccaaggtggagatcaagcgggtggagcccaagagcagcgataagacccacacctgccccccctgccctgcccccgagctgctgggcggacccagcgtgttcctgttcccccccaagcctaaggacaccctgatgatcagcagaacccccgaggtgacctgcgtggtggtggatgtgagccacgaggaccctgaggtgaagttcaactggtacgtggacggcgtggaggtgcacaatgccaagaccaagcccagggaggagcagtacaacagcacctaccgggtggtgtccgtgctgaccgtgctgcaccaggattggctgaacggcaaggagtacaagtgcaaggtgtccaacaaggccctgcctgcccctatcgagaaaaccatcagcaaggccaagggccagcccagagagccccaggtgtacaccctgccccctagcagagatgagctgaccaagaaccaggtgtccctgacctgcctggtgaagggcttctaccccagcgacatcgccgtggagtgggagagcaacggccagcccgagaacaactacaagaccaccccccctgtgctggacagcgatggcagcttcttcctgtacagcaagctgaccgtggacaagagcagatggcagcagggcaacgtgttcagctgcagcgtgatgcacgaggccctgcacaatcactacacccagaagagcctgagcctgtcccctggcaagtga

SEQ ID NO: 249 - DNA, 1026 bp, Artificial Sequence
  Synthetic
gacatccagatgacccagagcgacagcagcctgagcgcctctgtgggcgatagagtgaccatcacctgcagagccagccaggccatcgacagctacctgcactggtatcagcagaagcctggcaaggcccctaagctgctgatctacagcgccagcaatctggagaccggcgtgcctagcagattcagcggcagcggctccggcaccgacttcaccctgaccatcagcagcctgctgcctgaggatttcgccacctactactgccagcaggtggtgtggagacctttcaccttcggccagggcaccaaggtggagatcaagcgggtggagcccaagagcagcgataagacccacacctgccccccctgccctgcccccgagctgctgggcggacccagcgtgttcctgttcccccccaagcctaaggacaccctgatgatcagcagaacccccgaggtgacctgcgtggtggtggatgtgagccacgaggaccctgaggtgaagttcaactggtacgtggacggcgtggaggtgcacaatgccaagaccaagcccagggaggagcagtacaacagcacctaccgggtggtgtccgtgctgaccgtgctgcaccaggattggctgaacggcaaggagtacaagtgcaaggtgtccaacaaggccctgcctgcccctatcgagaaaaccatcagcaaggccaagggccagcccagagagccccaggtgtacaccctgccccctagcagagatgagctgaccaagaaccaggtgtccctgacctgcctggtgaagggcttctaccccagcgacatcgccgtggagtgggagagcaacggccagcccgagaacaactacaagaccaccccccctgtgctggacagcgatggcagcttcttcctgtacagcaagctgaccgtggacaagagcagatggcagcagggcaacgtgttcagctgcagcgtgatgcacgaggccctgcacaatcactacacccagaagagcctgagcctgtcccctggcaagtga

SEQ ID NO: 250 - DNA, 1026 bp, Artificial Sequence
  Synthetic
gacatccagatgacccagagccagagcagcctgagcgcctctgtgggcgatagagtgaccatcacctgcagagccagccaggccatcgacagctacctgcactggtatcagcagaagcctggcaaggcccctaagctgctgatctacagcgccagcaatctggagaccggcgtgcctagcagattcagcggcagcggctccggcaccgacttcaccctgaccatcagcagcctgctgcctgaggatttcgccacctactactgccagcaggtggtgtggagacctttcaccttcggccagggcaccaaggtggagatcaagcgggtggagcccaagagcagcgataagacccacacctgccccccctgccctgcccccgagctgctgggcggacccagcgtgttcctgttcccccccaagcctaaggacaccctgatgatcagcagaacccccgaggtgacctgcgtggtggtggatgtgagccacgaggaccctgaggtgaagttcaactggtacgtggacggcgtggaggtgcacaatgccaagaccaagcccagggaggagcagtacaacagcacctaccgggtggtgtccgtgctgaccgtgctgcaccaggattggctgaacggcaaggagtacaagtgcaaggtgtccaacaaggccctgcctgcccctatcgagaaaaccatcagcaaggccaagggccagcccagagagccccaggtgtacaccctgccccctagcagagatgagctgaccaagaaccaggtgtccctgacctgcctggtgaagggcttctaccccagcgacatcgccgtggagtgggagagcaacggccagcccgagaacaactacaagaccaccccccctgtgctggacagcgatggcagcttcttcctgtacagcaagctgaccgtggacaagagcagatggcagcagggcaacgtgttcagctgcagcgtgatgcacgaggccctgcacaatcactacacccagaagagcctgagcctgtcccctggcaagtga

SEQ ID NO: 251 - DNA, 1026 bp, Artificial Sequence
  Synthetic
gacatccagatgacccagagccacagcagcctgagcgcctctgtgggcgatagagtgaccatcacctgcagagccagccaggccatcgacagctacctgcactggtatcagcagaagcctggcaaggcccctaagctgctgatctacagcgccagcaatctggagaccggcgtgcctagcagattcagcggcagcggctccggcaccgacttcaccctgaccatcagcagcctgctgcctgaggatttcgccacctactactgccagcaggtggtgtggagacctttcaccttcggccagggcaccaaggtggagatcaagcgggtggagcccaagagcagcgataagacccacacctgccccccctgccctgcccccgagctgctgggcggacccagcgtgttcctgttcccccccaagcctaaggacaccctgatgatcagcagaacccccgaggtgacctgcgtggtggtggatgtgagccacgaggaccctgaggtgaagttcaactggtacgtggacggcgtggaggtgcacaatgccaagaccaagcccagggaggagcagtacaacagcacctaccgggtggtgtccgtgctgaccgtgctgcaccaggattggctgaacggcaaggagtacaagtgcaaggtgtccaacaaggccctgcctgcccctatcgagaaaaccatcagcaaggccaagggccagcccagagagccccaggtgtacaccctgccccctagcagagatgagctgaccaagaaccaggtgtccctgacctgcctggtgaagggcttctaccccagcgacatcgccgtggagtgggagagcaacggccagcccgagaacaactacaagaccaccccccctgtgctggacagcgatggcagcttcttcctgtacagcaagctgaccgtggacaagagcagatggcagcagggcaacgtgttcagctgcagcgtgatgcacgaggccctgcacaatcactacacccagaagagcctgagcctgtcccctggcaagtga

SEQ ID NO: 252 - DNA, 1026 bp, Artificial Sequence
  Synthetic
gacatccagatgacccagagcaagagcagcctgagcgcctctgtgggcgatagagtgaccatcacctgcagagccagccaggccatcgacagctacctgcactggtatcagcagaagcctggcaaggcccctaagctgctgatctacagcgccagcaatctggagaccggcgtgcctagcagattcagcggcagcggctccggcaccgacttcaccctgaccatcagcagcctgctgcctgaggatttcgccacctactactgccagcaggtggtgtggagacctttcaccttcggccagggcaccaaggtggagatcaagcgggtggagcccaagagcagcgataagacccacacctgccccccctgccctgcccccgagctgctgggcggacccagcgtgttcctgttcccccccaagcctaaggacaccctgatgatcagcagaacccccgaggtgacctgcgtggtggtggatgtgagccacgaggaccctgaggtgaagttcaactggtacgtggacggcgtggaggtgcacaatgccaagaccaagcccagggaggagcagtacaacagcacctaccgggtggtgtccgtgctgaccgtgctgcaccaggattggctgaacggcaaggagtacaagtgcaaggtgtccaacaaggccctgcctgcccctatcgagaaaaccatcagcaaggccaagggccagcccagagagccccaggtgtacaccctgccccctagcagagatgagctgaccaagaaccaggtgtccctgacctgcctggtgaagggcttctaccccagcgacatcgccgtggagtgggagagcaacggccagcccgagaacaactacaagaccaccccccctgtgctggacagcgatggcagcttcttcctgtacagcaagctgaccgtggacaagagcagatggcagcagggcaacgtgttcagctgcagcgtgatgcacgaggccctgcacaatcactacacccagaagagcctgagcctgtcccctggcaagtga

SEQ ID NO: 253 - DNA, 1026 bp, Artificial Sequence
  Synthetic
gacatccagatgacccagagcccctacagcctgagcgcctctgtgggcgatagagtgaccatcacctgcagagccagccaggccatcgacagctacctgcactggtatcagcagaagcctggcaaggcccctaagctgctgatctacagcgccagcaatctggagaccggcgtgcctagcagattcagcggcagcggctccggcaccgacttcaccctgaccatcagcagcctgctgcctgaggatttcgccacctactactgccagcaggtggtgtggagacctttcaccttcggccagggcaccaaggtggagatcaagcgggtggagcccaagagcagcgataagacccacacctgccccccctgccctgcccccgagctgctgggcggacccagcgtgttcctgttcccccccaagcctaaggacaccctgatgatcagcagaacccccgaggtgacctgcgtggtggtggatgtgagccacgaggaccctgaggtgaagttcaactggtacgtggacggcgtggaggtgcacaatgccaagaccaagcccagggaggagcagtacaacagcacctaccgggtggtgtccgtgctgaccgtgctgcaccaggattggctgaacggcaaggagtacaagtgcaaggtgtccaacaaggccctgcctgcccctatcgagaaaaccatcagcaaggccaagggccagcccagagagccccaggtgtacaccctgccccctagcagagatgagctgaccaagaaccaggtgtccctgacctgcctggtgaagggcttctaccccagcgacatcgccgtggagtgggagagcaacggccagcccgagaacaactacaagaccaccccccctgtgctggacagcgatggcagcttcttcctgtacagcaagctgaccgtggacaagagcagatggcagcagggcaacgtgttcagctgcagcgtgatgcacgaggccctgcacaatcactacacccagaagagcctgagcctgtcccctggcaagtga

SEQ ID NO: 254 - DNA, 1026 bp, Artificial Sequence
  Synthetic
gacatccagatgacccagagcccccagagcctgagcgcctctgtgggcgatagagtgaccatcacctgcagagccagccaggccatcgacagctacctgcactggtatcagcagaagcctggcaaggcccctaagctgctgatctacagcgccagcaatctggagaccggcgtgcctagcagattcagcggcagcggctccggcaccgacttcaccctgaccatcagcagcctgctgcctgaggatttcgccacctactactgccagcaggtggtgtggagacctttcaccttcggccagggcaccaaggtggagatcaagcgggtggagcccaagagcagcgataagacccacacctgccccccctgccctgcccccgagctgctgggcggacccagcgtgttcctgttcccccccaagcctaaggacaccctgatgatcagcagaacccccgaggtgacctgcgtggtggtggatgtgagccacgaggaccctgaggtgaagttcaactggtacgtggacggcgtggaggtgcacaatgccaagaccaagcccagggaggagcagtacaacagcacctaccgggtggtgtccgtgctgaccgtgctgcaccaggattggctgaacggcaaggagtacaagtgcaaggtgtccaacaaggccctgcctgcccctatcgagaaaaccatcagcaaggccaagggccagcccagagagccccaggtgtacaccctgccccctagcagagatgagctgaccaagaaccaggtgtccctgacctgcctggtgaagggcttctaccccagcgacatcgccgtggagtgggagagcaacggccagcccgagaacaactacaagaccaccccccctgtgctggacagcgatggcagcttcttcctgtacagcaagctgaccgtggacaagagcagatggcagcagggcaacgtgttcagctgcagcgtgatgcacgaggccctgcacaatcactacacccagaagagcctgagcctgtcccctggcaagtga

SEQ ID NO: 255 - DNA, 1026 bp, Artificial Sequence
  Synthetic
gacatccagatgacccagagcccccacagcctgagcgcctctgtgggcgatagagtgaccatcacctgcagagccagccaggccatcgacagctacctgcactggtatcagcagaagcctggcaaggcccctaagctgctgatctacagcgccagcaatctggagaccggcgtgcctagcagattcagcggcagcggctccggcaccgacttcaccctgaccatcagcagcctgctgcctgaggatttcgccacctactactgccagcaggtggtgtggagacctttcaccttcggccagggcaccaaggtggagatcaagcgggtggagcccaagagcagcgataagacccacacctgccccccctgccctgcccccgagctgctgggcggacccagcgtgttcctgttcccccccaagcctaaggacaccctgatgatcagcagaacccccgaggtgacctgcgtggtggtggatgtgagccacgaggaccctgaggtgaagttcaactggtacgtggacggcgtggaggtgcacaatgccaagaccaagcccagggaggagcagtacaacagcacctaccgggtggtgtccgtgctgaccgtgctgcaccaggattggctgaacggcaaggagtacaagtgcaaggtgtccaacaaggccctgcctgcccctatcgagaaaaccatcagcaaggccaagggccagcccagagagccccaggtgtacaccctgccccctagcagagatgagctgaccaagaaccaggtgtccctgacctgcctggtgaagggcttctaccccagcgacatcgccgtggagtgggagagcaacggccagcccgagaacaactacaagaccaccccccctgtgctggacagcgatggcagcttcttcctgtacagcaagctgaccgtggacaagagcagatggcagcagggcaacgtgttcagctgcagcgtgatgcacgaggccctgcacaatcactacacccagaagagcctgagcctgtcccctggcaagtga

SEQ ID NO: 256 - DNA, 1026 bp, Artificial Sequence
  Synthetic
gacatccagatgacccagagcccccccagcctgagcgcctctgtgggcgatagagtgaccatcacctgcagagccagccaggccatcgacagctacctgcactggtatcagcagaagcctggcaaggcccctaagctgctgatctacagcgccagcaatctggagaccggcgtgcctagcagattcagcggcagcggctccggcaccgacttcaccctgaccatcagcagcctgctgcctgaggatttcgccacctactactgccagcaggtggtgtggagacctttcaccttcggccagggcaccaaggtggagatcaagcgggtggagcccaagagcagcgataagacccacacctgccccccctgccctgcccccgagctgctgggcggacccagcgtgttcctgttcccccccaagcctaaggacaccctgatgatcagcagaacccccgaggtgacctgcgtggtggtggatgtgagccacgaggaccctgaggtgaagttcaactggtacgtggacggcgtggaggtgcacaatgccaagaccaagcccagggaggagcagtacaacagcacctaccgggtggtgtccgtgctgaccgtgctgcaccaggattggctgaacggcaaggagtacaagtgcaaggtgtccaacaaggccctgcctgcccctatcgagaaaaccatcagcaaggccaagggccagcccagagagccccaggtgtacaccctgccccctagcagagatgagctgaccaagaaccaggtgtccctgacctgcctggtgaagggcttctaccccagcgacatcgccgtggagtgggagagcaacggccagcccgagaacaactacaagaccaccccccctgtgctggacagcgatggcagcttcttcctgtacagcaagctgaccgtggacaagagcagatggcagcagggcaacgtgttcagctgcagcgtgatgcacgaggccctgcacaatcactacacccagaagagcctgagcctgtcccctggcaagtga

SEQ ID NO: 257 - DNA, 1026 bp, Artificial Sequence
  Synthetic
gacatccagatgacccagagccccaagagcctgagcgcctctgtgggcgatagagtgaccatcacctgcagagccagccaggccatcgacagctacctgcactggtatcagcagaagcctggcaaggcccctaagctgctgatctacagcgccagcaatctggagaccggcgtgcctagcagattcagcggcagcggctccggcaccgacttcaccctgaccatcagcagcctgctgcctgaggatttcgccacctactactgccagcaggtggtgtggagacctttcaccttcggccagggcaccaaggtggagatcaagcgggtggagcccaagagcagcgataagacccacacctgccccccctgccctgcccccgagctgctgggcggacccagcgtgttcctgttcccccccaagcctaaggacaccctgatgatcagcagaacccccgaggtgacctgcgtggtggtggatgtgagccacgaggaccctgaggtgaagttcaactggtacgtggacggcgtggaggtgcacaatgccaagaccaagcccagggaggagcagtacaacagcacctaccgggtggtgtccgtgctgaccgtgctgcaccaggattggctgaacggcaaggagtacaagtgcaaggtgtccaacaaggccctgcctgcccctatcgagaaaaccatcagcaaggccaagggccagcccagagagccccaggtgtacaccctgccccctagcagagatgagctgaccaagaaccaggtgtccctgacctgcctggtgaagggcttctaccccagcgacatcgccgtggagtgggagagcaacggccagcccgagaacaactacaagaccaccccccctgtgctggacagcgatggcagcttcttcctgtacagcaagctgaccgtggacaagagcagatggcagcagggcaacgtgttcagctgcagcgtgatgcacgaggccctgcacaatcactacacccagaagagcctgagcctgtcccctggcaagtga

SEQ ID NO: 258 - DNA, 1026 bp, Artificial Sequence
  Synthetic
gacatccagatgacccagagccccagctacctgagcgcctctgtgggcgatagagtgaccatcacctgcagagccagccaggccatcgacagctacctgcactggtatcagcagaagcctggcaaggcccctaagctgctgatctacagcgccagcaatctggagaccggcgtgcctagcagattcagcggcagcggctccggcaccgacttcaccctgaccatcagcagcctgctgcctgaggatttcgccacctactactgccagcaggtggtgtggagacctttcaccttcggccagggcaccaaggtggagatcaagcgggtggagcccaagagcagcgataagacccacacctgccccccctgccctgcccccgagctgctgggcggacccagcgtgttcctgttcccccccaagcctaaggacaccctgatgatcagcagaacccccgaggtgacctgcgtggtggtggatgtgagccacgaggaccctgaggtgaagttcaactggtacgtggacggcgtggaggtgcacaatgccaagaccaagcccagggaggagcagtacaacagcacctaccgggtggtgtccgtgctgaccgtgctgcaccaggattggctgaacggcaaggagtacaagtgcaaggtgtccaacaaggccctgcctgcccctatcgagaaaaccatcagcaaggccaagggccagcccagagagccccaggtgtacaccctgccccctagcagagatgagctgaccaagaaccaggtgtccctgacctgcctggtgaagggcttctaccccagcgacatcgccgtggagtgggagagcaacggccagcccgagaacaactacaagaccaccccccctgtgctggacagcgatggcagcttcttcctgtacagcaagctgaccgtggacaagagcagatggcagcagggcaacgtgttcagctgcagcgtgatgcacgaggccctgcacaatcactacacccagaagagcctgagcctgtcccctggcaagtga

SEQ ID NO: 259 - DNA, 1026 bp, Artificial Sequence
  Synthetic
gacatccagatgacccagagccccagcgacctgagcgcctctgtgggcgatagagtgaccatcacctgcagagccagccaggccatcgacagctacctgcactggtatcagcagaagcctggcaaggcccctaagctgctgatctacagcgccagcaatctggagaccggcgtgcctagcagattcagcggcagcggctccggcaccgacttcaccctgaccatcagcagcctgctgcctgaggatttcgccacctactactgccagcaggtggtgtggagacctttcaccttcggccagggcaccaaggtggagatcaagcgggtggagcccaagagcagcgataagacccacacctgccccccctgccctgcccccgagctgctgggcggacccagcgtgttcctgttcccccccaagcctaaggacaccctgatgatcagcagaacccccgaggtgacctgcgtggtggtggatgtgagccacgaggaccctgaggtgaagttcaactggtacgtggacggcgtggaggtgcacaatgccaagaccaagcccagggaggagcagtacaacagcacctaccgggtggtgtccgtgctgaccgtgctgcaccaggattggctgaacggcaaggagtacaagtgcaaggtgtccaacaaggccctgcctgcccctatcgagaaaaccatcagcaaggccaagggccagcccagagagccccaggtgtacaccctgccccctagcagagatgagctgaccaagaaccaggtgtccctgacctgcctggtgaagggcttctaccccagcgacatcgccgtggagtgggagagcaacggccagcccgagaacaactacaagaccaccccccctgtgctggacagcgatggcagcttcttcctgtacagcaagctgaccgtggacaagagcagatggcagcagggcaacgtgttcagctgcagcgtgatgcacgaggccctgcacaatcactacacccagaagagcctgagcctgtcccctggcaagtga

SEQ ID NO: 260 - DNA, 1026 bp, Artificial Sequence
  Synthetic
gacatccagatgacccagagccccagccacctgagcgcctctgtgggcgatagagtgaccatcacctgcagagccagccaggccatcgacagctacctgcactggtatcagcagaagcctggcaaggcccctaagctgctgatctacagcgccagcaatctggagaccggcgtgcctagcagattcagcggcagcggctccggcaccgacttcaccctgaccatcagcagcctgctgcctgaggatttcgccacctactactgccagcaggtggtgtggagacctttcaccttcggccagggcaccaaggtggagatcaagcgggtggagcccaagagcagcgataagacccacacctgccccccctgccctgcccccgagctgctgggcggacccagcgtgttcctgttcccccccaagcctaaggacaccctgatgatcagcagaacccccgaggtgacctgcgtggtggtggatgtgagccacgaggaccctgaggtgaagttcaactggtacgtggacggcgtggaggtgcacaatgccaagaccaagcccagggaggagcagtacaacagcacctaccgggtggtgtccgtgctgaccgtgctgcaccaggattggctgaacggcaaggagtacaagtgcaaggtgtccaacaaggccctgcctgcccctatcgagaaaaccatcagcaaggccaagggccagcccagagagccccaggtgtacaccctgccccctagcagagatgagctgaccaagaaccaggtgtccctgacctgcctggtgaagggcttctaccccagcgacatcgccgtggagtgggagagcaacggccagcccgagaacaactacaagaccaccccccctgtgctggacagcgatggcagcttcttcctgtacagcaagctgaccgtggacaagagcagatggcagcagggcaacgtgttcagctgcagcgtgatgcacgaggccctgcacaatcactacacccagaagagcctgagcctgtcccctggcaagtga

SEQ ID NO: 261 - DNA, 1026 bp, Artificial Sequence
  Synthetic
gacatccagatgacccagagccccagccccctgagcgcctctgtgggcgatagagtgaccatcacctgcagagccagccaggccatcgacagctacctgcactggtatcagcagaagcctggcaaggcccctaagctgctgatctacagcgccagcaatctggagaccggcgtgcctagcagattcagcggcagcggctccggcaccgacttcaccctgaccatcagcagcctgctgcctgaggatttcgccacctactactgccagcaggtggtgtggagacctttcaccttcggccagggcaccaaggtggagatcaagcgggtggagcccaagagcagcgataagacccacacctgccccccctgccctgcccccgagctgctgggcggacccagcgtgttcctgttcccccccaagcctaaggacaccctgatgatcagcagaacccccgaggtgacctgcgtggtggtggatgtgagccacgaggaccctgaggtgaagttcaactggtacgtggacggcgtggaggtgcacaatgccaagaccaagcccagggaggagcagtacaacagcacctaccgggtggtgtccgtgctgaccgtgctgcaccaggattggctgaacggcaaggagtacaagtgcaaggtgtccaacaaggccctgcctgcccctatcgagaaaaccatcagcaaggccaagggccagcccagagagccccaggtgtacaccctgccccctagcagagatgagctgaccaagaaccaggtgtccctgacctgcctggtgaagggcttctaccccagcgacatcgccgtggagtgggagagcaacggccagcccgagaacaactacaagaccaccccccctgtgctggacagcgatggcagcttcttcctgtacagcaagctgaccgtggacaagagcagatggcagcagggcaacgtgttcagctgcagcgtgatgcacgaggccctgcacaatcactacacccagaagagcctgagcctgtcccctggcaagtga

SEQ ID NO: 262 - DNA, 1026 bp, Artificial Sequence
  Synthetic
gacatccagatgacccagagccccagcaagctgagcgcctctgtgggcgatagagtgaccatcacctgcagagccagccaggccatcgacagctacctgcactggtatcagcagaagcctggcaaggcccctaagctgctgatctacagcgccagcaatctggagaccggcgtgcctagcagattcagcggcagcggctccggcaccgacttcaccctgaccatcagcagcctgctgcctgaggatttcgccacctactactgccagcaggtggtgtggagacctttcaccttcggccagggcaccaaggtggagatcaagcgggtggagcccaagagcagcgataagacccacacctgccccccctgccctgcccccgagctgctgggcggacccagcgtgttcctgttcccccccaagcctaaggacaccctgatgatcagcagaacccccgaggtgacctgcgtggtggtggatgtgagccacgaggaccctgaggtgaagttcaactggtacgtggacggcgtggaggtgcacaatgccaagaccaagcccagggaggagcagtacaacagcacctaccgggtggtgtccgtgctgaccgtgctgcaccaggattggctgaacggcaaggagtacaagtgcaaggtgtccaacaaggccctgcctgcccctatcgagaaaaccatcagcaaggccaagggccagcccagagagccccaggtgtacaccctgccccctagcagagatgagctgaccaagaaccaggtgtccctgacctgcctggtgaagggcttctaccccagcgacatcgccgtggagtgggagagcaacggccagcccgagaacaactacaagaccaccccccctgtgctggacagcgatggcagcttcttcctgtacagcaagctgaccgtggacaagagcagatggcagcagggcaacgtgttcagctgcagcgtgatgcacgaggccctgcacaatcactacacccagaagagcctgagcctgtcccctggcaagtga

SEQ ID NO: 263 - DNA, 1026 bp, Artificial Sequence
  Synthetic
gacatccagatgacccagagccccagcagctacagcgcctctgtgggcgatagagtgaccatcacctgcagagccagccaggccatcgacagctacctgcactggtatcagcagaagcctggcaaggcccctaagctgctgatctacagcgccagcaatctggagaccggcgtgcctagcagattcagcggcagcggctccggcaccgacttcaccctgaccatcagcagcctgctgcctgaggatttcgccacctactactgccagcaggtggtgtggagacctttcaccttcggccagggcaccaaggtggagatcaagcgggtggagcccaagagcagcgataagacccacacctgccccccctgccctgcccccgagctgctgggcggacccagcgtgttcctgttcccccccaagcctaaggacaccctgatgatcagcagaacccccgaggtgacctgcgtggtggtggatgtgagccacgaggaccctgaggtgaagttcaactggtacgtggacggcgtggaggtgcacaatgccaagaccaagcccagggaggagcagtacaacagcacctaccgggtggtgtccgtgctgaccgtgctgcaccaggattggctgaacggcaaggagtacaagtgcaaggtgtccaacaaggccctgcctgcccctatcgagaaaaccatcagcaaggccaagggccagcccagagagccccaggtgtacaccctgccccctagcagagatgagctgaccaagaaccaggtgtccctgacctgcctggtgaagggcttctaccccagcgacatcgccgtggagtgggagagcaacggccagcccgagaacaactacaagaccaccccccctgtgctggacagcgatggcagcttcttcctgtacagcaagctgaccgtggacaagagcagatggcagcagggcaacgtgttcagctgcagcgtgatgcacgaggccctgcacaatcactacacccagaagagcctgagcctgtcccctggcaagtga

SEQ ID NO: 264 - DNA, 1026 bp, Artificial Sequence
  Synthetic
gacatccagatgacccagagccccagcagcgacagcgcctctgtgggcgatagagtgaccatcacctgcagagccagccaggccatcgacagctacctgcactggtatcagcagaagcctggcaaggcccctaagctgctgatctacagcgccagcaatctggagaccggcgtgcctagcagattcagcggcagcggctccggcaccgacttcaccctgaccatcagcagcctgctgcctgaggatttcgccacctactactgccagcaggtggtgtggagacctttcaccttcggccagggcaccaaggtggagatcaagcgggtggagcccaagagcagcgataagacccacacctgccccccctgccctgcccccgagctgctgggcggacccagcgtgttcctgttcccccccaagcctaaggacaccctgatgatcagcagaacccccgaggtgacctgcgtggtggtggatgtgagccacgaggaccctgaggtgaagttcaactggtacgtggacggcgtggaggtgcacaatgccaagaccaagcccagggaggagcagtacaacagcacctaccgggtggtgtccgtgctgaccgtgctgcaccaggattggctgaacggcaaggagtacaagtgcaaggtgtccaacaaggccctgcctgcccctatcgagaaaaccatcagcaaggccaagggccagcccagagagccccaggtgtacaccctgccccctagcagagatgagctgaccaagaaccaggtgtccctgacctgcctggtgaagggcttctaccccagcgacatcgccgtggagtgggagagcaacggccagcccgagaacaactacaagaccaccccccctgtgctggacagcgatggcagcttcttcctgtacagcaagctgaccgtggacaagagcagatggcagcagggcaacgtgttcagctgcagcgtgatgcacgaggccctgcacaatcactacacccagaagagcctgagcctgtcccctggcaagtga

SEQ ID NO: 265 - DNA, 1026 bp, Artificial Sequence
  Synthetic
gacatccagatgacccagagccccagcagccacagcgcctctgtgggcgatagagtgaccatcacctgcagagccagccaggccatcgacagctacctgcactggtatcagcagaagcctggcaaggcccctaagctgctgatctacagcgccagcaatctggagaccggcgtgcctagcagattcagcggcagcggctccggcaccgacttcaccctgaccatcagcagcctgctgcctgaggatttcgccacctactactgccagcaggtggtgtggagacctttcaccttcggccagggcaccaaggtggagatcaagcgggtggagcccaagagcagcgataagacccacacctgccccccctgccctgcccccgagctgctgggcggacccagcgtgttcctgttcccccccaagcctaaggacaccctgatgatcagcagaacccccgaggtgacctgcgtggtggtggatgtgagccacgaggaccctgaggtgaagttcaactggtacgtggacggcgtggaggtgcacaatgccaagaccaagcccagggaggagcagtacaacagcacctaccgggtggtgtccgtgctgaccgtgctgcaccaggattggctgaacggcaaggagtacaagtgcaaggtgtccaacaaggccctgcctgcccctatcgagaaaaccatcagcaaggccaagggccagcccagagagccccaggtgtacaccctgccccctagcagagatgagctgaccaagaaccaggtgtccctgacctgcctggtgaagggcttctaccccagcgacatcgccgtggagtgggagagcaacggccagcccgagaacaactacaagaccaccccccctgtgctggacagcgatggcagcttcttcctgtacagcaagctgaccgtggacaagagcagatggcagcagggcaacgtgttcagctgcagcgtgatgcacgaggccctgcacaatcactacacccagaagagcctgagcctgtcccctggcaagtga

SEQ ID NO: 266 - DNA, 1026 bp, Artificial Sequence
  Synthetic
gacatccagatgacccagagccccagcagccccagcgcctctgtgggcgatagagtgaccatcacctgcagagccagccaggccatcgacagctacctgcactggtatcagcagaagcctggcaaggcccctaagctgctgatctacagcgccagcaatctggagaccggcgtgcctagcagattcagcggcagcggctccggcaccgacttcaccctgaccatcagcagcctgctgcctgaggatttcgccacctactactgccagcaggtggtgtggagacctttcaccttcggccagggcaccaaggtggagatcaagcgggtggagcccaagagcagcgataagacccacacctgccccccctgccctgcccccgagctgctgggcggacccagcgtgttcctgttcccccccaagcctaaggacaccctgatgatcagcagaacccccgaggtgacctgcgtggtggtggatgtgagccacgaggaccctgaggtgaagttcaactggtacgtggacggcgtggaggtgcacaatgccaagaccaagcccagggaggagcagtacaacagcacctaccgggtggtgtccgtgctgaccgtgctgcaccaggattggctgaacggcaaggagtacaagtgcaaggtgtccaacaaggccctgcctgcccctatcgagaaaaccatcagcaaggccaagggccagcccagagagccccaggtgtacaccctgccccctagcagagatgagctgaccaagaaccaggtgtccctgacctgcctggtgaagggcttctaccccagcgacatcgccgtggagtgggagagcaacggccagcccgagaacaactacaagaccaccccccctgtgctggacagcgatggcagcttcttcctgtacagcaagctgaccgtggacaagagcagatggcagcagggcaacgtgttcagctgcagcgtgatgcacgaggccctgcacaatcactacacccagaagagcctgagcctgtcccctggcaagtga

SEQ ID NO: 267 - DNA, 1026 bp, Artificial Sequence
  Synthetic
gacatccagatgacccagagccccagcagcaagagcgcctctgtgggcgatagagtgaccatcacctgcagagccagccaggccatcgacagctacctgcactggtatcagcagaagcctggcaaggcccctaagctgctgatctacagcgccagcaatctggagaccggcgtgcctagcagattcagcggcagcggctccggcaccgacttcaccctgaccatcagcagcctgctgcctgaggatttcgccacctactactgccagcaggtggtgtggagacctttcaccttcggccagggcaccaaggtggagatcaagcgggtggagcccaagagcagcgataagacccacacctgccccccctgccctgcccccgagctgctgggcggacccagcgtgttcctgttcccccccaagcctaaggacaccctgatgatcagcagaacccccgaggtgacctgcgtggtggtggatgtgagccacgaggaccctgaggtgaagttcaactggtacgtggacggcgtggaggtgcacaatgccaagaccaagcccagggaggagcagtacaacagcacctaccgggtggtgtccgtgctgaccgtgctgcaccaggattggctgaacggcaaggagtacaagtgcaaggtgtccaacaaggccctgcctgcccctatcgagaaaaccatcagcaaggccaagggccagcccagagagccccaggtgtacaccctgccccctagcagagatgagctgaccaagaaccaggtgtccctgacctgcctggtgaagggcttctaccccagcgacatcgccgtggagtgggagagcaacggccagcccgagaacaactacaagaccaccccccctgtgctggacagcgatggcagcttcttcctgtacagcaagctgaccgtggacaagagcagatggcagcagggcaacgtgttcagctgcagcgtgatgcacgaggccctgcacaatcactacacccagaagagcctgagcctgtcccctggcaagtga

SEQ ID NO: 268 - DNA, 1026 bp, Artificial Sequence
  Synthetic
gacatccagatgacccagagccccagcagcctgctggcctctgtgggcgatagagtgaccatcacctgcagagccagccaggccatcgacagctacctgcactggtatcagcagaagcctggcaaggcccctaagctgctgatctacagcgccagcaatctggagaccggcgtgcctagcagattcagcggcagcggctccggcaccgacttcaccctgaccatcagcagcctgctgcctgaggatttcgccacctactactgccagcaggtggtgtggagacctttcaccttcggccagggcaccaaggtggagatcaagcgggtggagcccaagagcagcgataagacccacacctgccccccctgccctgcccccgagctgctgggcggacccagcgtgttcctgttcccccccaagcctaaggacaccctgatgatcagcagaacccccgaggtgacctgcgtggtggtggatgtgagccacgaggaccctgaggtgaagttcaactggtacgtggacggcgtggaggtgcacaatgccaagaccaagcccagggaggagcagtacaacagcacctaccgggtggtgtccgtgctgaccgtgctgcaccaggattggctgaacggcaaggagtacaagtgcaaggtgtccaacaaggccctgcctgcccctatcgagaaaaccatcagcaaggccaagggccagcccagagagccccaggtgtacaccctgccccctagcagagatgagctgaccaagaaccaggtgtccctgacctgcctggtgaagggcttctaccccagcgacatcgccgtggagtgggagagcaacggccagcccgagaacaactacaagaccaccccccctgtgctggacagcgatggcagcttcttcctgtacagcaagctgaccgtggacaagagcagatggcagcagggcaacgtgttcagctgcagcgtgatgcacgaggccctgcacaatcactacacccagaagagcctgagcctgtcccctggcaagtga

SEQ ID NO: 269 - DNA, 1026 bp, Artificial Sequence
  Synthetic
gacatccagatgacccagagccccagcagcctgtacgcctctgtgggcgatagagtgaccatcacctgcagagccagccaggccatcgacagctacctgcactggtatcagcagaagcctggcaaggcccctaagctgctgatctacagcgccagcaatctggagaccggcgtgcctagcagattcagcggcagcggctccggcaccgacttcaccctgaccatcagcagcctgctgcctgaggatttcgccacctactactgccagcaggtggtgtggagacctttcaccttcggccagggcaccaaggtggagatcaagcgggtggagcccaagagcagcgataagacccacacctgccccccctgccctgcccccgagctgctgggcggacccagcgtgttcctgttcccccccaagcctaaggacaccctgatgatcagcagaacccccgaggtgacctgcgtggtggtggatgtgagccacgaggaccctgaggtgaagttcaactggtacgtggacggcgtggaggtgcacaatgccaagaccaagcccagggaggagcagtacaacagcacctaccgggtggtgtccgtgctgaccgtgctgcaccaggattggctgaacggcaaggagtacaagtgcaaggtgtccaacaaggccctgcctgcccctatcgagaaaaccatcagcaaggccaagggccagcccagagagccccaggtgtacaccctgccccctagcagagatgagctgaccaagaaccaggtgtccctgacctgcctggtgaagggcttctaccccagcgacatcgccgtggagtgggagagcaacggccagcccgagaacaactacaagaccaccccccctgtgctggacagcgatggcagcttcttcctgtacagcaagctgaccgtggacaagagcagatggcagcagggcaacgtgttcagctgcagcgtgatgcacgaggccctgcacaatcactacacccagaagagcctgagcctgtcccctggcaagtga

SEQ ID NO: 270 - DNA, 1026 bp, Artificial Sequence
  Synthetic
gacatccagatgacccagagccccagcagcctggacgcctctgtgggcgatagagtgaccatcacctgcagagccagccaggccatcgacagctacctgcactggtatcagcagaagcctggcaaggcccctaagctgctgatctacagcgccagcaatctggagaccggcgtgcctagcagattcagcggcagcggctccggcaccgacttcaccctgaccatcagcagcctgctgcctgaggatttcgccacctactactgccagcaggtggtgtggagacctttcaccttcggccagggcaccaaggtggagatcaagcgggtggagcccaagagcagcgataagacccacacctgccccccctgccctgcccccgagctgctgggcggacccagcgtgttcctgttcccccccaagcctaaggacaccctgatgatcagcagaacccccgaggtgacctgcgtggtggtggatgtgagccacgaggaccctgaggtgaagttcaactggtacgtggacggcgtggaggtgcacaatgccaagaccaagcccagggaggagcagtacaacagcacctaccgggtggtgtccgtgctgaccgtgctgcaccaggattggctgaacggcaaggagtacaagtgcaaggtgtccaacaaggccctgcctgcccctatcgagaaaaccatcagcaaggccaagggccagcccagagagccccaggtgtacaccctgccccctagcagagatgagctgaccaagaaccaggtgtccctgacctgcctggtgaagggcttctaccccagcgacatcgccgtggagtgggagagcaacggccagcccgagaacaactacaagaccaccccccctgtgctggacagcgatggcagcttcttcctgtacagcaagctgaccgtggacaagagcagatggcagcagggcaacgtgttcagctgcagcgtgatgcacgaggccctgcacaatcactacacccagaagagcctgagcctgtcccctggcaagtga

SEQ ID NO: 271 - DNA, 1026 bp, Artificial Sequence
  Synthetic
gacatccagatgacccagagccccagcagcctgcaggcctctgtgggcgatagagtgaccatcacctgcagagccagccaggccatcgacagctacctgcactggtatcagcagaagcctggcaaggcccctaagctgctgatctacagcgccagcaatctggagaccggcgtgcctagcagattcagcggcagcggctccggcaccgacttcaccctgaccatcagcagcctgctgcctgaggatttcgccacctactactgccagcaggtggtgtggagacctttcaccttcggccagggcaccaaggtggagatcaagcgggtggagcccaagagcagcgataagacccacacctgccccccctgccctgcccccgagctgctgggcggacccagcgtgttcctgttcccccccaagcctaaggacaccctgatgatcagcagaacccccgaggtgacctgcgtggtggtggatgtgagccacgaggaccctgaggtgaagttcaactggtacgtggacggcgtggaggtgcacaatgccaagaccaagcccagggaggagcagtacaacagcacctaccgggtggtgtccgtgctgaccgtgctgcaccaggattggctgaacggcaaggagtacaagtgcaaggtgtccaacaaggccctgcctgcccctatcgagaaaaccatcagcaaggccaagggccagcccagagagccccaggtgtacaccctgccccctagcagagatgagctgaccaagaaccaggtgtccctgacctgcctggtgaagggcttctaccccagcgacatcgccgtggagtgggagagcaacggccagcccgagaacaactacaagaccaccccccctgtgctggacagcgatggcagcttcttcctgtacagcaagctgaccgtggacaagagcagatggcagcagggcaacgtgttcagctgcagcgtgatgcacgaggccctgcacaatcactacacccagaagagcctgagcctgtcccctggcaagtga

SEQ ID NO: 272 - DNA, 1026 bp, Artificial Sequence
  Synthetic
gacatccagatgacccagagccccagcagcctgcacgcctctgtgggcgatagagtgaccatcacctgcagagccagccaggccatcgacagctacctgcactggtatcagcagaagcctggcaaggcccctaagctgctgatctacagcgccagcaatctggagaccggcgtgcctagcagattcagcggcagcggctccggcaccgacttcaccctgaccatcagcagcctgctgcctgaggatttcgccacctactactgccagcaggtggtgtggagacctttcaccttcggccagggcaccaaggtggagatcaagcgggtggagcccaagagcagcgataagacccacacctgccccccctgccctgcccccgagctgctgggcggacccagcgtgttcctgttcccccccaagcctaaggacaccctgatgatcagcagaacccccgaggtgacctgcgtggtggtggatgtgagccacgaggaccctgaggtgaagttcaactggtacgtggacggcgtggaggtgcacaatgccaagaccaagcccagggaggagcagtacaacagcacctaccgggtggtgtccgtgctgaccgtgctgcaccaggattggctgaacggcaaggagtacaagtgcaaggtgtccaacaaggccctgcctgcccctatcgagaaaaccatcagcaaggccaagggccagcccagagagccccaggtgtacaccctgccccctagcagagatgagctgaccaagaaccaggtgtccctgacctgcctggtgaagggcttctaccccagcgacatcgccgtggagtgggagagcaacggccagcccgagaacaactacaagaccaccccccctgtgctggacagcgatggcagcttcttcctgtacagcaagctgaccgtggacaagagcagatggcagcagggcaacgtgttcagctgcagcgtgatgcacgaggccctgcacaatcactacacccagaagagcctgagcctgtcccctggcaagtga

SEQ ID NO: 273 - DNA, 1026 bp, Artificial Sequence
  Synthetic
gacatccagatgacccagagccccagcagcctgaaggcctctgtgggcgatagagtgaccatcacctgcagagccagccaggccatcgacagctacctgcactggtatcagcagaagcctggcaaggcccctaagctgctgatctacagcgccagcaatctggagaccggcgtgcctagcagattcagcggcagcggctccggcaccgacttcaccctgaccatcagcagcctgctgcctgaggatttcgccacctactactgccagcaggtggtgtggagacctttcaccttcggccagggcaccaaggtggagatcaagcgggtggagcccaagagcagcgataagacccacacctgccccccctgccctgcccccgagctgctgggcggacccagcgtgttcctgttcccccccaagcctaaggacaccctgatgatcagcagaacccccgaggtgacctgcgtggtggtggatgtgagccacgaggaccctgaggtgaagttcaactggtacgtggacggcgtggaggtgcacaatgccaagaccaagcccagggaggagcagtacaacagcacctaccgggtggtgtccgtgctgaccgtgctgcaccaggattggctgaacggcaaggagtacaagtgcaaggtgtccaacaaggccctgcctgcccctatcgagaaaaccatcagcaaggccaagggccagcccagagagccccaggtgtacaccctgccccctagcagagatgagctgaccaagaaccaggtgtccctgacctgcctggtgaagggcttctaccccagcgacatcgccgtggagtgggagagcaacggccagcccgagaacaactacaagaccaccccccctgtgctggacagcgatggcagcttcttcctgtacagcaagctgaccgtggacaagagcagatggcagcagggcaacgtgttcagctgcagcgtgatgcacgaggccctgcacaatcactacacccagaagagcctgagcctgtcccctggcaagtga

SEQ ID NO: 274 - DNA, 1026 bp, Artificial Sequence
  Synthetic
gacatccagatgacccagagccccagcagcctgagcagctctgtgggcgatagagtgaccatcacctgcagagccagccaggccatcgacagctacctgcactggtatcagcagaagcctggcaaggcccctaagctgctgatctacagcgccagcaatctggagaccggcgtgcctagcagattcagcggcagcggctccggcaccgacttcaccctgaccatcagcagcctgctgcctgaggatttcgccacctactactgccagcaggtggtgtggagacctttcaccttcggccagggcaccaaggtggagatcaagcgggtggagcccaagagcagcgataagacccacacctgccccccctgccctgcccccgagctgctgggcggacccagcgtgttcctgttcccccccaagcctaaggacaccctgatgatcagcagaacccccgaggtgacctgcgtggtggtggatgtgagccacgaggaccctgaggtgaagttcaactggtacgtggacggcgtggaggtgcacaatgccaagaccaagcccagggaggagcagtacaacagcacctaccgggtggtgtccgtgctgaccgtgctgcaccaggattggctgaacggcaaggagtacaagtgcaaggtgtccaacaaggccctgcctgcccctatcgagaaaaccatcagcaaggccaagggccagcccagagagccccaggtgtacaccctgccccctagcagagatgagctgaccaagaaccaggtgtccctgacctgcctggtgaagggcttctaccccagcgacatcgccgtggagtgggagagcaacggccagcccgagaacaactacaagaccaccccccctgtgctggacagcgatggcagcttcttcctgtacagcaagctgaccgtggacaagagcagatggcagcagggcaacgtgttcagctgcagcgtgatgcacgaggccctgcacaatcactacacccagaagagcctgagcctgtcccctggcaagtga

SEQ ID NO: 275 - DNA, 1026 bp, Artificial Sequence
  Synthetic
gacatccagatgacccagagccccagcagcctgagctactctgtgggcgatagagtgaccatcacctgcagagccagccaggccatcgacagctacctgcactggtatcagcagaagcctggcaaggcccctaagctgctgatctacagcgccagcaatctggagaccggcgtgcctagcagattcagcggcagcggctccggcaccgacttcaccctgaccatcagcagcctgctgcctgaggatttcgccacctactactgccagcaggtggtgtggagacctttcaccttcggccagggcaccaaggtggagatcaagcgggtggagcccaagagcagcgataagacccacacctgccccccctgccctgcccccgagctgctgggcggacccagcgtgttcctgttcccccccaagcctaaggacaccctgatgatcagcagaacccccgaggtgacctgcgtggtggtggatgtgagccacgaggaccctgaggtgaagttcaactggtacgtggacggcgtggaggtgcacaatgccaagaccaagcccagggaggagcagtacaacagcacctaccgggtggtgtccgtgctgaccgtgctgcaccaggattggctgaacggcaaggagtacaagtgcaaggtgtccaacaaggccctgcctgcccctatcgagaaaaccatcagcaaggccaagggccagcccagagagccccaggtgtacaccctgccccctagcagagatgagctgaccaagaaccaggtgtccctgacctgcctggtgaagggcttctaccccagcgacatcgccgtggagtgggagagcaacggccagcccgagaacaactacaagaccaccccccctgtgctggacagcgatggcagcttcttcctgtacagcaagctgaccgtggacaagagcagatggcagcagggcaacgtgttcagctgcagcgtgatgcacgaggccctgcacaatcactacacccagaagagcctgagcctgtcccctggcaagtga

SEQ ID NO: 276 - DNA, 1026 bp, Artificial Sequence
  Synthetic
gacatccagatgacccagagccccagcagcctgagcgactctgtgggcgatagagtgaccatcacctgcagagccagccaggccatcgacagctacctgcactggtatcagcagaagcctggcaaggcccctaagctgctgatctacagcgccagcaatctggagaccggcgtgcctagcagattcagcggcagcggctccggcaccgacttcaccctgaccatcagcagcctgctgcctgaggatttcgccacctactactgccagcaggtggtgtggagacctttcaccttcggccagggcaccaaggtggagatcaagcgggtggagcccaagagcagcgataagacccacacctgccccccctgccctgcccccgagctgctgggcggacccagcgtgttcctgttcccccccaagcctaaggacaccctgatgatcagcagaacccccgaggtgacctgcgtggtggtggatgtgagccacgaggaccctgaggtgaagttcaactggtacgtggacggcgtggaggtgcacaatgccaagaccaagcccagggaggagcagtacaacagcacctaccgggtggtgtccgtgctgaccgtgctgcaccaggattggctgaacggcaaggagtacaagtgcaaggtgtccaacaaggccctgcctgcccctatcgagaaaaccatcagcaaggccaagggccagcccagagagccccaggtgtacaccctgccccctagcagagatgagctgaccaagaaccaggtgtccctgacctgcctggtgaagggcttctaccccagcgacatcgccgtggagtgggagagcaacggccagcccgagaacaactacaagaccaccccccctgtgctggacagcgatggcagcttcttcctgtacagcaagctgaccgtggacaagagcagatggcagcagggcaacgtgttcagctgcagcgtgatgcacgaggccctgcacaatcactacacccagaagagcctgagcctgtcccctggcaagtga

SEQ ID NO: 277 - DNA, 1026 bp, Artificial Sequence
  Synthetic
gacatccagatgacccagagccccagcagcctgagccagtctgtgggcgatagagtgaccatcacctgcagagccagccaggccatcgacagctacctgcactggtatcagcagaagcctggcaaggcccctaagctgctgatctacagcgccagcaatctggagaccggcgtgcctagcagattcagcggcagcggctccggcaccgacttcaccctgaccatcagcagcctgctgcctgaggatttcgccacctactactgccagcaggtggtgtggagacctttcaccttcggccagggcaccaaggtggagatcaagcgggtggagcccaagagcagcgataagacccacacctgccccccctgccctgcccccgagctgctgggcggacccagcgtgttcctgttcccccccaagcctaaggacaccctgatgatcagcagaacccccgaggtgacctgcgtggtggtggatgtgagccacgaggaccctgaggtgaagttcaactggtacgtggacggcgtggaggtgcacaatgccaagaccaagcccagggaggagcagtacaacagcacctaccgggtggtgtccgtgctgaccgtgctgcaccaggattggctgaacggcaaggagtacaagtgcaaggtgtccaacaaggccctgcctgcccctatcgagaaaaccatcagcaaggccaagggccagcccagagagccccaggtgtacaccctgccccctagcagagatgagctgaccaagaaccaggtgtccctgacctgcctggtgaagggcttctaccccagcgacatcgccgtggagtgggagagcaacggccagcccgagaacaactacaagaccaccccccctgtgctggacagcgatggcagcttcttcctgtacagcaagctgaccgtggacaagagcagatggcagcagggcaacgtgttcagctgcagcgtgatgcacgaggccctgcacaatcactacacccagaagagcctgagcctgtcccctggcaagtga

SEQ ID NO: 278 - DNA, 1026 bp, Artificial Sequence
  Synthetic
gacatccagatgacccagagccccagcagcctgagccactctgtgggcgatagagtgaccatcacctgcagagccagccaggccatcgacagctacctgcactggtatcagcagaagcctggcaaggcccctaagctgctgatctacagcgccagcaatctggagaccggcgtgcctagcagattcagcggcagcggctccggcaccgacttcaccctgaccatcagcagcctgctgcctgaggatttcgccacctactactgccagcaggtggtgtggagacctttcaccttcggccagggcaccaaggtggagatcaagcgggtggagcccaagagcagcgataagacccacacctgccccccctgccctgcccccgagctgctgggcggacccagcgtgttcctgttcccccccaagcctaaggacaccctgatgatcagcagaacccccgaggtgacctgcgtggtggtggatgtgagccacgaggaccctgaggtgaagttcaactggtacgtggacggcgtggaggtgcacaatgccaagaccaagcccagggaggagcagtacaacagcacctaccgggtggtgtccgtgctgaccgtgctgcaccaggattggctgaacggcaaggagtacaagtgcaaggtgtccaacaaggccctgcctgcccctatcgagaaaaccatcagcaaggccaagggccagcccagagagccccaggtgtacaccctgccccctagcagagatgagctgaccaagaaccaggtgtccctgacctgcctggtgaagggcttctaccccagcgacatcgccgtggagtgggagagcaacggccagcccgagaacaactacaagaccaccccccctgtgctggacagcgatggcagcttcttcctgtacagcaagctgaccgtggacaagagcagatggcagcagggcaacgtgttcagctgcagcgtgatgcacgaggccctgcacaatcactacacccagaagagcctgagcctgtcccctggcaagtga

SEQ ID NO: 279 - DNA, 1026 bp, Artificial Sequence
  Synthetic
gacatccagatgacccagagccccagcagcctgagcccctctgtgggcgatagagtgaccatcacctgcagagccagccaggccatcgacagctacctgcactggtatcagcagaagcctggcaaggcccctaagctgctgatctacagcgccagcaatctggagaccggcgtgcctagcagattcagcggcagcggctccggcaccgacttcaccctgaccatcagcagcctgctgcctgaggatttcgccacctactactgccagcaggtggtgtggagacctttcaccttcggccagggcaccaaggtggagatcaagcgggtggagcccaagagcagcgataagacccacacctgccccccctgccctgcccccgagctgctgggcggacccagcgtgttcctgttcccccccaagcctaaggacaccctgatgatcagcagaacccccgaggtgacctgcgtggtggtggatgtgagccacgaggaccctgaggtgaagttcaactggtacgtggacggcgtggaggtgcacaatgccaagaccaagcccagggaggagcagtacaacagcacctaccgggtggtgtccgtgctgaccgtgctgcaccaggattggctgaacggcaaggagtacaagtgcaaggtgtccaacaaggccctgcctgcccctatcgagaaaaccatcagcaaggccaagggccagcccagagagccccaggtgtacaccctgccccctagcagagatgagctgaccaagaaccaggtgtccctgacctgcctggtgaagggcttctaccccagcgacatcgccgtggagtgggagagcaacggccagcccgagaacaactacaagaccaccccccctgtgctggacagcgatggcagcttcttcctgtacagcaagctgaccgtggacaagagcagatggcagcagggcaacgtgttcagctgcagcgtgatgcacgaggccctgcacaatcactacacccagaagagcctgagcctgtcccctggcaagtga

SEQ ID NO: 280 - DNA, 1026 bp, Artificial Sequence
  Synthetic
gacatccagatgacccagagccccagcagcctgagcaagtctgtgggcgatagagtgaccatcacctgcagagccagccaggccatcgacagctacctgcactggtatcagcagaagcctggcaaggcccctaagctgctgatctacagcgccagcaatctggagaccggcgtgcctagcagattcagcggcagcggctccggcaccgacttcaccctgaccatcagcagcctgctgcctgaggatttcgccacctactactgccagcaggtggtgtggagacctttcaccttcggccagggcaccaaggtggagatcaagcgggtggagcccaagagcagcgataagacccacacctgccccccctgccctgcccccgagctgctgggcggacccagcgtgttcctgttcccccccaagcctaaggacaccctgatgatcagcagaacccccgaggtgacctgcgtggtggtggatgtgagccacgaggaccctgaggtgaagttcaactggtacgtggacggcgtggaggtgcacaatgccaagaccaagcccagggaggagcagtacaacagcacctaccgggtggtgtccgtgctgaccgtgctgcaccaggattggctgaacggcaaggagtacaagtgcaaggtgtccaacaaggccctgcctgcccctatcgagaaaaccatcagcaaggccaagggccagcccagagagccccaggtgtacaccctgccccctagcagagatgagctgaccaagaaccaggtgtccctgacctgcctggtgaagggcttctaccccagcgacatcgccgtggagtgggagagcaacggccagcccgagaacaactacaagaccaccccccctgtgctggacagcgatggcagcttcttcctgtacagcaagctgaccgtggacaagagcagatggcagcagggcaacgtgttcagctgcagcgtgatgcacgaggccctgcacaatcactacacccagaagagcctgagcctgtcccctggcaagtga

SEQ ID NO: 281 - DNA, 1026 bp, Artificial Sequence
  Synthetic
gacatccagatgacccagagccccagcagcctgagcgccctggtgggcgatagagtgaccatcacctgcagagccagccaggccatcgacagctacctgcactggtatcagcagaagcctggcaaggcccctaagctgctgatctacagcgccagcaatctggagaccggcgtgcctagcagattcagcggcagcggctccggcaccgacttcaccctgaccatcagcagcctgctgcctgaggatttcgccacctactactgccagcaggtggtgtggagacctttcaccttcggccagggcaccaaggtggagatcaagcgggtggagcccaagagcagcgataagacccacacctgccccccctgccctgcccccgagctgctgggcggacccagcgtgttcctgttcccccccaagcctaaggacaccctgatgatcagcagaacccccgaggtgacctgcgtggtggtggatgtgagccacgaggaccctgaggtgaagttcaactggtacgtggacggcgtggaggtgcacaatgccaagaccaagcccagggaggagcagtacaacagcacctaccgggtggtgtccgtgctgaccgtgctgcaccaggattggctgaacggcaaggagtacaagtgcaaggtgtccaacaaggccctgcctgcccctatcgagaaaaccatcagcaaggccaagggccagcccagagagccccaggtgtacaccctgccccctagcagagatgagctgaccaagaaccaggtgtccctgacctgcctggtgaagggcttctaccccagcgacatcgccgtggagtgggagagcaacggccagcccgagaacaactacaagaccaccccccctgtgctggacagcgatggcagcttcttcctgtacagcaagctgaccgtggacaagagcagatggcagcagggcaacgtgttcagctgcagcgtgatgcacgaggccctgcacaatcactacacccagaagagcctgagcctgtcccctggcaagtga

SEQ ID NO: 282 - DNA, 1026 bp, Artificial Sequence
  Synthetic
gacatccagatgacccagagccccagcagcctgagcgccgacgtgggcgatagagtgaccatcacctgcagagccagccaggccatcgacagctacctgcactggtatcagcagaagcctggcaaggcccctaagctgctgatctacagcgccagcaatctggagaccggcgtgcctagcagattcagcggcagcggctccggcaccgacttcaccctgaccatcagcagcctgctgcctgaggatttcgccacctactactgccagcaggtggtgtggagacctttcaccttcggccagggcaccaaggtggagatcaagcgggtggagcccaagagcagcgataagacccacacctgccccccctgccctgcccccgagctgctgggcggacccagcgtgttcctgttcccccccaagcctaaggacaccctgatgatcagcagaacccccgaggtgacctgcgtggtggtggatgtgagccacgaggaccctgaggtgaagttcaactggtacgtggacggcgtggaggtgcacaatgccaagaccaagcccagggaggagcagtacaacagcacctaccgggtggtgtccgtgctgaccgtgctgcaccaggattggctgaacggcaaggagtacaagtgcaaggtgtccaacaaggccctgcctgcccctatcgagaaaaccatcagcaaggccaagggccagcccagagagccccaggtgtacaccctgccccctagcagagatgagctgaccaagaaccaggtgtccctgacctgcctggtgaagggcttctaccccagcgacatcgccgtggagtgggagagcaacggccagcccgagaacaactacaagaccaccccccctgtgctggacagcgatggcagcttcttcctgtacagcaagctgaccgtggacaagagcagatggcagcagggcaacgtgttcagctgcagcgtgatgcacgaggccctgcacaatcactacacccagaagagcctgagcctgtcccctggcaagtga

SEQ ID NO: 283 - DNA, 1026 bp, Artificial Sequence
  Synthetic
gacatccagatgacccagagccccagcagcctgagcgcccaggtgggcgatagagtgaccatcacctgcagagccagccaggccatcgacagctacctgcactggtatcagcagaagcctggcaaggcccctaagctgctgatctacagcgccagcaatctggagaccggcgtgcctagcagattcagcggcagcggctccggcaccgacttcaccctgaccatcagcagcctgctgcctgaggatttcgccacctactactgccagcaggtggtgtggagacctttcaccttcggccagggcaccaaggtggagatcaagcgggtggagcccaagagcagcgataagacccacacctgccccccctgccctgcccccgagctgctgggcggacccagcgtgttcctgttcccccccaagcctaaggacaccctgatgatcagcagaacccccgaggtgacctgcgtggtggtggatgtgagccacgaggaccctgaggtgaagttcaactggtacgtggacggcgtggaggtgcacaatgccaagaccaagcccagggaggagcagtacaacagcacctaccgggtggtgtccgtgctgaccgtgctgcaccaggattggctgaacggcaaggagtacaagtgcaaggtgtccaacaaggccctgcctgcccctatcgagaaaaccatcagcaaggccaagggccagcccagagagccccaggtgtacaccctgccccctagcagagatgagctgaccaagaaccaggtgtccctgacctgcctggtgaagggcttctaccccagcgacatcgccgtggagtgggagagcaacggccagcccgagaacaactacaagaccaccccccctgtgctggacagcgatggcagcttcttcctgtacagcaagctgaccgtggacaagagcagatggcagcagggcaacgtgttcagctgcagcgtgatgcacgaggccctgcacaatcactacacccagaagagcctgagcctgtcccctggcaagtga

SEQ ID NO: 284 - DNA, 1026 bp, Artificial Sequence
  Synthetic
gacatccagatgacccagagccccagcagcctgagcgcccacgtgggcgatagagtgaccatcacctgcagagccagccaggccatcgacagctacctgcactggtatcagcagaagcctggcaaggcccctaagctgctgatctacagcgccagcaatctggagaccggcgtgcctagcagattcagcggcagcggctccggcaccgacttcaccctgaccatcagcagcctgctgcctgaggatttcgccacctactactgccagcaggtggtgtggagacctttcaccttcggccagggcaccaaggtggagatcaagcgggtggagcccaagagcagcgataagacccacacctgccccccctgccctgcccccgagctgctgggcggacccagcgtgttcctgttcccccccaagcctaaggacaccctgatgatcagcagaacccccgaggtgacctgcgtggtggtggatgtgagccacgaggaccctgaggtgaagttcaactggtacgtggacggcgtggaggtgcacaatgccaagaccaagcccagggaggagcagtacaacagcacctaccgggtggtgtccgtgctgaccgtgctgcaccaggattggctgaacggcaaggagtacaagtgcaaggtgtccaacaaggccctgcctgcccctatcgagaaaaccatcagcaaggccaagggccagcccagagagccccaggtgtacaccctgccccctagcagagatgagctgaccaagaaccaggtgtccctgacctgcctggtgaagggcttctaccccagcgacatcgccgtggagtgggagagcaacggccagcccgagaacaactacaagaccaccccccctgtgctggacagcgatggcagcttcttcctgtacagcaagctgaccgtggacaagagcagatggcagcagggcaacgtgttcagctgcagcgtgatgcacgaggccctgcacaatcactacacccagaagagcctgagcctgtcccctggcaagtga

SEQ ID NO: 285 - DNA, 1026 bp, Artificial Sequence
  Synthetic
gacatccagatgacccagagccccagcagcctgagcgcccccgtgggcgatagagtgaccatcacctgcagagccagccaggccatcgacagctacctgcactggtatcagcagaagcctggcaaggcccctaagctgctgatctacagcgccagcaatctggagaccggcgtgcctagcagattcagcggcagcggctccggcaccgacttcaccctgaccatcagcagcctgctgcctgaggatttcgccacctactactgccagcaggtggtgtggagacctttcaccttcggccagggcaccaaggtggagatcaagcgggtggagcccaagagcagcgataagacccacacctgccccccctgccctgcccccgagctgctgggcggacccagcgtgttcctgttcccccccaagcctaaggacaccctgatgatcagcagaacccccgaggtgacctgcgtggtggtggatgtgagccacgaggaccctgaggtgaagttcaactggtacgtggacggcgtggaggtgcacaatgccaagaccaagcccagggaggagcagtacaacagcacctaccgggtggtgtccgtgctgaccgtgctgcaccaggattggctgaacggcaaggagtacaagtgcaaggtgtccaacaaggccctgcctgcccctatcgagaaaaccatcagcaaggccaagggccagcccagagagccccaggtgtacaccctgccccctagcagagatgagctgaccaagaaccaggtgtccctgacctgcctggtgaagggcttctaccccagcgacatcgccgtggagtgggagagcaacggccagcccgagaacaactacaagaccaccccccctgtgctggacagcgatggcagcttcttcctgtacagcaagctgaccgtggacaagagcagatggcagcagggcaacgtgttcagctgcagcgtgatgcacgaggccctgcacaatcactacacccagaagagcctgagcctgtcccctggcaagtga

SEQ ID NO: 286 - DNA, 1026 bp, Artificial Sequence
  Synthetic
gacatccagatgacccagagccccagcagcctgagcgccaaggtgggcgatagagtgaccatcacctgcagagccagccaggccatcgacagctacctgcactggtatcagcagaagcctggcaaggcccctaagctgctgatctacagcgccagcaatctggagaccggcgtgcctagcagattcagcggcagcggctccggcaccgacttcaccctgaccatcagcagcctgctgcctgaggatttcgccacctactactgccagcaggtggtgtggagacctttcaccttcggccagggcaccaaggtggagatcaagcgggtggagcccaagagcagcgataagacccacacctgccccccctgccctgcccccgagctgctgggcggacccagcgtgttcctgttcccccccaagcctaaggacaccctgatgatcagcagaacccccgaggtgacctgcgtggtggtggatgtgagccacgaggaccctgaggtgaagttcaactggtacgtggacggcgtggaggtgcacaatgccaagaccaagcccagggaggagcagtacaacagcacctaccgggtggtgtccgtgctgaccgtgctgcaccaggattggctgaacggcaaggagtacaagtgcaaggtgtccaacaaggccctgcctgcccctatcgagaaaaccatcagcaaggccaagggccagcccagagagccccaggtgtacaccctgccccctagcagagatgagctgaccaagaaccaggtgtccctgacctgcctggtgaagggcttctaccccagcgacatcgccgtggagtgggagagcaacggccagcccgagaacaactacaagaccaccccccctgtgctggacagcgatggcagcttcttcctgtacagcaagctgaccgtggacaagagcagatggcagcagggcaacgtgttcagctgcagcgtgatgcacgaggccctgcacaatcactacacccagaagagcctgagcctgtcccctggcaagtga

SEQ ID NO: 287 - DNA, 1026 bp, Artificial Sequence
  Synthetic
gacatccagatgacccagagccccagcagcctgagcgcctctagcggcgatagagtgaccatcacctgcagagccagccaggccatcgacagctacctgcactggtatcagcagaagcctggcaaggcccctaagctgctgatctacagcgccagcaatctggagaccggcgtgcctagcagattcagcggcagcggctccggcaccgacttcaccctgaccatcagcagcctgctgcctgaggatttcgccacctactactgccagcaggtggtgtggagacctttcaccttcggccagggcaccaaggtggagatcaagcgggtggagcccaagagcagcgataagacccacacctgccccccctgccctgcccccgagctgctgggcggacccagcgtgttcctgttcccccccaagcctaaggacaccctgatgatcagcagaacccccgaggtgacctgcgtggtggtggatgtgagccacgaggaccctgaggtgaagttcaactggtacgtggacggcgtggaggtgcacaatgccaagaccaagcccagggaggagcagtacaacagcacctaccgggtggtgtccgtgctgaccgtgctgcaccaggattggctgaacggcaaggagtacaagtgcaaggtgtccaacaaggccctgcctgcccctatcgagaaaaccatcagcaaggccaagggccagcccagagagccccaggtgtacaccctgccccctagcagagatgagctgaccaagaaccaggtgtccctgacctgcctggtgaagggcttctaccccagcgacatcgccgtggagtgggagagcaacggccagcccgagaacaactacaagaccaccccccctgtgctggacagcgatggcagcttcttcctgtacagcaagctgaccgtggacaagagcagatggcagcagggcaacgtgttcagctgcagcgtgatgcacgaggccctgcacaatcactacacccagaagagcctgagcctgtcccctggcaagtga

SEQ ID NO: 288 - DNA, 1026 bp, Artificial Sequence
  Synthetic
gacatccagatgacccagagccccagcagcctgagcgcctcttacggcgatagagtgaccatcacctgcagagccagccaggccatcgacagctacctgcactggtatcagcagaagcctggcaaggcccctaagctgctgatctacagcgccagcaatctggagaccggcgtgcctagcagattcagcggcagcggctccggcaccgacttcaccctgaccatcagcagcctgctgcctgaggatttcgccacctactactgccagcaggtggtgtggagacctttcaccttcggccagggcaccaaggtggagatcaagcgggtggagcccaagagcagcgataagacccacacctgccccccctgccctgcccccgagctgctgggcggacccagcgtgttcctgttcccccccaagcctaaggacaccctgatgatcagcagaacccccgaggtgacctgcgtggtggtggatgtgagccacgaggaccctgaggtgaagttcaactggtacgtggacggcgtggaggtgcacaatgccaagaccaagcccagggaggagcagtacaacagcacctaccgggtggtgtccgtgctgaccgtgctgcaccaggattggctgaacggcaaggagtacaagtgcaaggtgtccaacaaggccctgcctgcccctatcgagaaaaccatcagcaaggccaagggccagcccagagagccccaggtgtacaccctgccccctagcagagatgagctgaccaagaaccaggtgtccctgacctgcctggtgaagggcttctaccccagcgacatcgccgtggagtgggagagcaacggccagcccgagaacaactacaagaccaccccccctgtgctggacagcgatggcagcttcttcctgtacagcaagctgaccgtggacaagagcagatggcagcagggcaacgtgttcagctgcagcgtgatgcacgaggccctgcacaatcactacacccagaagagcctgagcctgtcccctggcaagtga

SEQ ID NO: 289 - DNA, 1026 bp, Artificial Sequence
  Synthetic
gacatccagatgacccagagccccagcagcctgagcgcctctgacggcgatagagtgaccatcacctgcagagccagccaggccatcgacagctacctgcactggtatcagcagaagcctggcaaggcccctaagctgctgatctacagcgccagcaatctggagaccggcgtgcctagcagattcagcggcagcggctccggcaccgacttcaccctgaccatcagcagcctgctgcctgaggatttcgccacctactactgccagcaggtggtgtggagacctttcaccttcggccagggcaccaaggtggagatcaagcgggtggagcccaagagcagcgataagacccacacctgccccccctgccctgcccccgagctgctgggcggacccagcgtgttcctgttcccccccaagcctaaggacaccctgatgatcagcagaacccccgaggtgacctgcgtggtggtggatgtgagccacgaggaccctgaggtgaagttcaactggtacgtggacggcgtggaggtgcacaatgccaagaccaagcccagggaggagcagtacaacagcacctaccgggtggtgtccgtgctgaccgtgctgcaccaggattggctgaacggcaaggagtacaagtgcaaggtgtccaacaaggccctgcctgcccctatcgagaaaaccatcagcaaggccaagggccagcccagagagccccaggtgtacaccctgccccctagcagagatgagctgaccaagaaccaggtgtccctgacctgcctggtgaagggcttctaccccagcgacatcgccgtggagtgggagagcaacggccagcccgagaacaactacaagaccaccccccctgtgctggacagcgatggcagcttcttcctgtacagcaagctgaccgtggacaagagcagatggcagcagggcaacgtgttcagctgcagcgtgatgcacgaggccctgcacaatcactacacccagaagagcctgagcctgtcccctggcaagtga

SEQ ID NO: 290 - DNA, 1026 bp, Artificial Sequence
  Synthetic
gacatccagatgacccagagccccagcagcctgagcgcctctcagggcgatagagtgaccatcacctgcagagccagccaggccatcgacagctacctgcactggtatcagcagaagcctggcaaggcccctaagctgctgatctacagcgccagcaatctggagaccggcgtgcctagcagattcagcggcagcggctccggcaccgacttcaccctgaccatcagcagcctgctgcctgaggatttcgccacctactactgccagcaggtggtgtggagacctttcaccttcggccagggcaccaaggtggagatcaagcgggtggagcccaagagcagcgataagacccacacctgccccccctgccctgcccccgagctgctgggcggacccagcgtgttcctgttcccccccaagcctaaggacaccctgatgatcagcagaacccccgaggtgacctgcgtggtggtggatgtgagccacgaggaccctgaggtgaagttcaactggtacgtggacggcgtggaggtgcacaatgccaagaccaagcccagggaggagcagtacaacagcacctaccgggtggtgtccgtgctgaccgtgctgcaccaggattggctgaacggcaaggagtacaagtgcaaggtgtccaacaaggccctgcctgcccctatcgagaaaaccatcagcaaggccaagggccagcccagagagccccaggtgtacaccctgccccctagcagagatgagctgaccaagaaccaggtgtccctgacctgcctggtgaagggcttctaccccagcgacatcgccgtggagtgggagagcaacggccagcccgagaacaactacaagaccaccccccctgtgctggacagcgatggcagcttcttcctgtacagcaagctgaccgtggacaagagcagatggcagcagggcaacgtgttcagctgcagcgtgatgcacgaggccctgcacaatcactacacccagaagagcctgagcctgtcccctggcaagtga

SEQ ID NO: 291 - DNA, 1026 bp, Artificial Sequence
  Synthetic
gacatccagatgacccagagccccagcagcctgagcgcctctcacggcgatagagtgaccatcacctgcagagccagccaggccatcgacagctacctgcactggtatcagcagaagcctggcaaggcccctaagctgctgatctacagcgccagcaatctggagaccggcgtgcctagcagattcagcggcagcggctccggcaccgacttcaccctgaccatcagcagcctgctgcctgaggatttcgccacctactactgccagcaggtggtgtggagacctttcaccttcggccagggcaccaaggtggagatcaagcgggtggagcccaagagcagcgataagacccacacctgccccccctgccctgcccccgagctgctgggcggacccagcgtgttcctgttcccccccaagcctaaggacaccctgatgatcagcagaacccccgaggtgacctgcgtggtggtggatgtgagccacgaggaccctgaggtgaagttcaactggtacgtggacggcgtggaggtgcacaatgccaagaccaagcccagggaggagcagtacaacagcacctaccgggtggtgtccgtgctgaccgtgctgcaccaggattggctgaacggcaaggagtacaagtgcaaggtgtccaacaaggccctgcctgcccctatcgagaaaaccatcagcaaggccaagggccagcccagagagccccaggtgtacaccctgccccctagcagagatgagctgaccaagaaccaggtgtccctgacctgcctggtgaagggcttctaccccagcgacatcgccgtggagtgggagagcaacggccagcccgagaacaactacaagaccaccccccctgtgctggacagcgatggcagcttcttcctgtacagcaagctgaccgtggacaagagcagatggcagcagggcaacgtgttcagctgcagcgtgatgcacgaggccctgcacaatcactacacccagaagagcctgagcctgtcccctggcaagtga

SEQ ID NO: 292 - DNA, 1026 bp, Artificial Sequence
  Synthetic
gacatccagatgacccagagccccagcagcctgagcgcctctaagggcgatagagtgaccatcacctgcagagccagccaggccatcgacagctacctgcactggtatcagcagaagcctggcaaggcccctaagctgctgatctacagcgccagcaatctggagaccggcgtgcctagcagattcagcggcagcggctccggcaccgacttcaccctgaccatcagcagcctgctgcctgaggatttcgccacctactactgccagcaggtggtgtggagacctttcaccttcggccagggcaccaaggtggagatcaagcgggtggagcccaagagcagcgataagacccacacctgccccccctgccctgcccccgagctgctgggcggacccagcgtgttcctgttcccccccaagcctaaggacaccctgatgatcagcagaacccccgaggtgacctgcgtggtggtggatgtgagccacgaggaccctgaggtgaagttcaactggtacgtggacggcgtggaggtgcacaatgccaagaccaagcccagggaggagcagtacaacagcacctaccgggtggtgtccgtgctgaccgtgctgcaccaggattggctgaacggcaaggagtacaagtgcaaggtgtccaacaaggccctgcctgcccctatcgagaaaaccatcagcaaggccaagggccagcccagagagccccaggtgtacaccctgccccctagcagagatgagctgaccaagaaccaggtgtccctgacctgcctggtgaagggcttctaccccagcgacatcgccgtggagtgggagagcaacggccagcccgagaacaactacaagaccaccccccctgtgctggacagcgatggcagcttcttcctgtacagcaagctgaccgtggacaagagcagatggcagcagggcaacgtgttcagctgcagcgtgatgcacgaggccctgcacaatcactacacccagaagagcctgagcctgtcccctggcaagtga

SEQ ID NO: 293 - DNA, 1026 bp, Artificial Sequence
  Synthetic
gacatccagatgacccagagccccagcagcctgagcgcctctgtgagcgatagagtgaccatcacctgcagagccagccaggccatcgacagctacctgcactggtatcagcagaagcctggcaaggcccctaagctgctgatctacagcgccagcaatctggagaccggcgtgcctagcagattcagcggcagcggctccggcaccgacttcaccctgaccatcagcagcctgctgcctgaggatttcgccacctactactgccagcaggtggtgtggagacctttcaccttcggccagggcaccaaggtggagatcaagcgggtggagcccaagagcagcgataagacccacacctgccccccctgccctgcccccgagctgctgggcggacccagcgtgttcctgttcccccccaagcctaaggacaccctgatgatcagcagaacccccgaggtgacctgcgtggtggtggatgtgagccacgaggaccctgaggtgaagttcaactggtacgtggacggcgtggaggtgcacaatgccaagaccaagcccagggaggagcagtacaacagcacctaccgggtggtgtccgtgctgaccgtgctgcaccaggattggctgaacggcaaggagtacaagtgcaaggtgtccaacaaggccctgcctgcccctatcgagaaaaccatcagcaaggccaagggccagcccagagagccccaggtgtacaccctgccccctagcagagatgagctgaccaagaaccaggtgtccctgacctgcctggtgaagggcttctaccccagcgacatcgccgtggagtgggagagcaacggccagcccgagaacaactacaagaccaccccccctgtgctggacagcgatggcagcttcttcctgtacagcaagctgaccgtggacaagagcagatggcagcagggcaacgtgttcagctgcagcgtgatgcacgaggccctgcacaatcactacacccagaagagcctgagcctgtcccctggcaagtga

SEQ ID NO: 294 - DNA, 1026 bp, Artificial Sequence
  Synthetic
gacatccagatgacccagagccccagcagcctgagcgcctctgtgctggatagagtgaccatcacctgcagagccagccaggccatcgacagctacctgcactggtatcagcagaagcctggcaaggcccctaagctgctgatctacagcgccagcaatctggagaccggcgtgcctagcagattcagcggcagcggctccggcaccgacttcaccctgaccatcagcagcctgctgcctgaggatttcgccacctactactgccagcaggtggtgtggagacctttcaccttcggccagggcaccaaggtggagatcaagcgggtggagcccaagagcagcgataagacccacacctgccccccctgccctgcccccgagctgctgggcggacccagcgtgttcctgttcccccccaagcctaaggacaccctgatgatcagcagaacccccgaggtgacctgcgtggtggtggatgtgagccacgaggaccctgaggtgaagttcaactggtacgtggacggcgtggaggtgcacaatgccaagaccaagcccagggaggagcagtacaacagcacctaccgggtggtgtccgtgctgaccgtgctgcaccaggattggctgaacggcaaggagtacaagtgcaaggtgtccaacaaggccctgcctgcccctatcgagaaaaccatcagcaaggccaagggccagcccagagagccccaggtgtacaccctgccccctagcagagatgagctgaccaagaaccaggtgtccctgacctgcctggtgaagggcttctaccccagcgacatcgccgtggagtgggagagcaacggccagcccgagaacaactacaagaccaccccccctgtgctggacagcgatggcagcttcttcctgtacagcaagctgaccgtggacaagagcagatggcagcagggcaacgtgttcagctgcagcgtgatgcacgaggccctgcacaatcactacacccagaagagcctgagcctgtcccctggcaagtga

SEQ ID NO: 295 - DNA, 1026 bp, Artificial Sequence
  Synthetic
gacatccagatgacccagagccccagcagcctgagcgcctctgtggacgatagagtgaccatcacctgcagagccagccaggccatcgacagctacctgcactggtatcagcagaagcctggcaaggcccctaagctgctgatctacagcgccagcaatctggagaccggcgtgcctagcagattcagcggcagcggctccggcaccgacttcaccctgaccatcagcagcctgctgcctgaggatttcgccacctactactgccagcaggtggtgtggagacctttcaccttcggccagggcaccaaggtggagatcaagcgggtggagcccaagagcagcgataagacccacacctgccccccctgccctgcccccgagctgctgggcggacccagcgtgttcctgttcccccccaagcctaaggacaccctgatgatcagcagaacccccgaggtgacctgcgtggtggtggatgtgagccacgaggaccctgaggtgaagttcaactggtacgtggacggcgtggaggtgcacaatgccaagaccaagcccagggaggagcagtacaacagcacctaccgggtggtgtccgtgctgaccgtgctgcaccaggattggctgaacggcaaggagtacaagtgcaaggtgtccaacaaggccctgcctgcccctatcgagaaaaccatcagcaaggccaagggccagcccagagagccccaggtgtacaccctgccccctagcagagatgagctgaccaagaaccaggtgtccctgacctgcctggtgaagggcttctaccccagcgacatcgccgtggagtgggagagcaacggccagcccgagaacaactacaagaccaccccccctgtgctggacagcgatggcagcttcttcctgtacagcaagctgaccgtggacaagagcagatggcagcagggcaacgtgttcagctgcagcgtgatgcacgaggccctgcacaatcactacacccagaagagcctgagcctgtcccctggcaagtga

SEQ ID NO: 296 - DNA, 1026 bp, Artificial Sequence
  Synthetic
gacatccagatgacccagagccccagcagcctgagcgcctctgtgcaggatagagtgaccatcacctgcagagccagccaggccatcgacagctacctgcactggtatcagcagaagcctggcaaggcccctaagctgctgatctacagcgccagcaatctggagaccggcgtgcctagcagattcagcggcagcggctccggcaccgacttcaccctgaccatcagcagcctgctgcctgaggatttcgccacctactactgccagcaggtggtgtggagacctttcaccttcggccagggcaccaaggtggagatcaagcgggtggagcccaagagcagcgataagacccacacctgccccccctgccctgcccccgagctgctgggcggacccagcgtgttcctgttcccccccaagcctaaggacaccctgatgatcagcagaacccccgaggtgacctgcgtggtggtggatgtgagccacgaggaccctgaggtgaagttcaactggtacgtggacggcgtggaggtgcacaatgccaagaccaagcccagggaggagcagtacaacagcacctaccgggtggtgtccgtgctgaccgtgctgcaccaggattggctgaacggcaaggagtacaagtgcaaggtgtccaacaaggccctgcctgcccctatcgagaaaaccatcagcaaggccaagggccagcccagagagccccaggtgtacaccctgccccctagcagagatgagctgaccaagaaccaggtgtccctgacctgcctggtgaagggcttctaccccagcgacatcgccgtggagtgggagagcaacggccagcccgagaacaactacaagaccaccccccctgtgctggacagcgatggcagcttcttcctgtacagcaagctgaccgtggacaagagcagatggcagcagggcaacgtgttcagctgcagcgtgatgcacgaggccctgcacaatcactacacccagaagagcctgagcctgtcccctggcaagtga

SEQ ID NO: 297 - DNA, 1026 bp, Artificial Sequence
  Synthetic
gacatccagatgacccagagccccagcagcctgagcgcctctgtgcacgatagagtgaccatcacctgcagagccagccaggccatcgacagctacctgcactggtatcagcagaagcctggcaaggcccctaagctgctgatctacagcgccagcaatctggagaccggcgtgcctagcagattcagcggcagcggctccggcaccgacttcaccctgaccatcagcagcctgctgcctgaggatttcgccacctactactgccagcaggtggtgtggagacctttcaccttcggccagggcaccaaggtggagatcaagcgggtggagcccaagagcagcgataagacccacacctgccccccctgccctgcccccgagctgctgggcggacccagcgtgttcctgttcccccccaagcctaaggacaccctgatgatcagcagaacccccgaggtgacctgcgtggtggtggatgtgagccacgaggaccctgaggtgaagttcaactggtacgtggacggcgtggaggtgcacaatgccaagaccaagcccagggaggagcagtacaacagcacctaccgggtggtgtccgtgctgaccgtgctgcaccaggattggctgaacggcaaggagtacaagtgcaaggtgtccaacaaggccctgcctgcccctatcgagaaaaccatcagcaaggccaagggccagcccagagagccccaggtgtacaccctgccccctagcagagatgagctgaccaagaaccaggtgtccctgacctgcctggtgaagggcttctaccccagcgacatcgccgtggagtgggagagcaacggccagcccgagaacaactacaagaccaccccccctgtgctggacagcgatggcagcttcttcctgtacagcaagctgaccgtggacaagagcagatggcagcagggcaacgtgttcagctgcagcgtgatgcacgaggccctgcacaatcactacacccagaagagcctgagcctgtcccctggcaagtga

SEQ ID NO: 298 - DNA, 1026 bp, Artificial Sequence
  Synthetic
gacatccagatgacccagagccccagcagcctgagcgcctctgtgcccgatagagtgaccatcacctgcagagccagccaggccatcgacagctacctgcactggtatcagcagaagcctggcaaggcccctaagctgctgatctacagcgccagcaatctggagaccggcgtgcctagcagattcagcggcagcggctccggcaccgacttcaccctgaccatcagcagcctgctgcctgaggatttcgccacctactactgccagcaggtggtgtggagacctttcaccttcggccagggcaccaaggtggagatcaagcgggtggagcccaagagcagcgataagacccacacctgccccccctgccctgcccccgagctgctgggcggacccagcgtgttcctgttcccccccaagcctaaggacaccctgatgatcagcagaacccccgaggtgacctgcgtggtggtggatgtgagccacgaggaccctgaggtgaagttcaactggtacgtggacggcgtggaggtgcacaatgccaagaccaagcccagggaggagcagtacaacagcacctaccgggtggtgtccgtgctgaccgtgctgcaccaggattggctgaacggcaaggagtacaagtgcaaggtgtccaacaaggccctgcctgcccctatcgagaaaaccatcagcaaggccaagggccagcccagagagccccaggtgtacaccctgccccctagcagagatgagctgaccaagaaccaggtgtccctgacctgcctggtgaagggcttctaccccagcgacatcgccgtggagtgggagagcaacggccagcccgagaacaactacaagaccaccccccctgtgctggacagcgatggcagcttcttcctgtacagcaagctgaccgtggacaagagcagatggcagcagggcaacgtgttcagctgcagcgtgatgcacgaggccctgcacaatcactacacccagaagagcctgagcctgtcccctggcaagtga

SEQ ID NO: 299 - DNA, 1026 bp, Artificial Sequence
  Synthetic
gacatccagatgacccagagccccagcagcctgagcgcctctgtgggcagcagagtgaccatcacctgcagagccagccaggccatcgacagctacctgcactggtatcagcagaagcctggcaaggcccctaagctgctgatctacagcgccagcaatctggagaccggcgtgcctagcagattcagcggcagcggctccggcaccgacttcaccctgaccatcagcagcctgctgcctgaggatttcgccacctactactgccagcaggtggtgtggagacctttcaccttcggccagggcaccaaggtggagatcaagcgggtggagcccaagagcagcgataagacccacacctgccccccctgccctgcccccgagctgctgggcggacccagcgtgttcctgttcccccccaagcctaaggacaccctgatgatcagcagaacccccgaggtgacctgcgtggtggtggatgtgagccacgaggaccctgaggtgaagttcaactggtacgtggacggcgtggaggtgcacaatgccaagaccaagcccagggaggagcagtacaacagcacctaccgggtggtgtccgtgctgaccgtgctgcaccaggattggctgaacggcaaggagtacaagtgcaaggtgtccaacaaggccctgcctgcccctatcgagaaaaccatcagcaaggccaagggccagcccagagagccccaggtgtacaccctgccccctagcagagatgagctgaccaagaaccaggtgtccctgacctgcctggtgaagggcttctaccccagcgacatcgccgtggagtgggagagcaacggccagcccgagaacaactacaagaccaccccccctgtgctggacagcgatggcagcttcttcctgtacagcaagctgaccgtggacaagagcagatggcagcagggcaacgtgttcagctgcagcgtgatgcacgaggccctgcacaatcactacacccagaagagcctgagcctgtcccctggcaagtga

SEQ ID NO: 300 - DNA, 1026 bp, Artificial Sequence
  Synthetic
gacatccagatgacccagagccccagcagcctgagcgcctctgtgggcctgagagtgaccatcacctgcagagccagccaggccatcgacagctacctgcactggtatcagcagaagcctggcaaggcccctaagctgctgatctacagcgccagcaatctggagaccggcgtgcctagcagattcagcggcagcggctccggcaccgacttcaccctgaccatcagcagcctgctgcctgaggatttcgccacctactactgccagcaggtggtgtggagacctttcaccttcggccagggcaccaaggtggagatcaagcgggtggagcccaagagcagcgataagacccacacctgccccccctgccctgcccccgagctgctgggcggacccagcgtgttcctgttcccccccaagcctaaggacaccctgatgatcagcagaacccccgaggtgacctgcgtggtggtggatgtgagccacgaggaccctgaggtgaagttcaactggtacgtggacggcgtggaggtgcacaatgccaagaccaagcccagggaggagcagtacaacagcacctaccgggtggtgtccgtgctgaccgtgctgcaccaggattggctgaacggcaaggagtacaagtgcaaggtgtccaacaaggccctgcctgcccctatcgagaaaaccatcagcaaggccaagggccagcccagagagccccaggtgtacaccctgccccctagcagagatgagctgaccaagaaccaggtgtccctgacctgcctggtgaagggcttctaccccagcgacatcgccgtggagtgggagagcaacggccagcccgagaacaactacaagaccaccccccctgtgctggacagcgatggcagcttcttcctgtacagcaagctgaccgtggacaagagcagatggcagcagggcaacgtgttcagctgcagcgtgatgcacgaggccctgcacaatcactacacccagaagagcctgagcctgtcccctggcaagtga

SEQ ID NO: 301 - DNA, 1026 bp, Artificial Sequence
  Synthetic
gacatccagatgacccagagccccagcagcctgagcgcctctgtgggctacagagtgaccatcacctgcagagccagccaggccatcgacagctacctgcactggtatcagcagaagcctggcaaggcccctaagctgctgatctacagcgccagcaatctggagaccggcgtgcctagcagattcagcggcagcggctccggcaccgacttcaccctgaccatcagcagcctgctgcctgaggatttcgccacctactactgccagcaggtggtgtggagacctttcaccttcggccagggcaccaaggtggagatcaagcgggtggagcccaagagcagcgataagacccacacctgccccccctgccctgcccccgagctgctgggcggacccagcgtgttcctgttcccccccaagcctaaggacaccctgatgatcagcagaacccccgaggtgacctgcgtggtggtggatgtgagccacgaggaccctgaggtgaagttcaactggtacgtggacggcgtggaggtgcacaatgccaagaccaagcccagggaggagcagtacaacagcacctaccgggtggtgtccgtgctgaccgtgctgcaccaggattggctgaacggcaaggagtacaagtgcaaggtgtccaacaaggccctgcctgcccctatcgagaaaaccatcagcaaggccaagggccagcccagagagccccaggtgtacaccctgccccctagcagagatgagctgaccaagaaccaggtgtccctgacctgcctggtgaagggcttctaccccagcgacatcgccgtggagtgggagagcaacggccagcccgagaacaactacaagaccaccccccctgtgctggacagcgatggcagcttcttcctgtacagcaagctgaccgtggacaagagcagatggcagcagggcaacgtgttcagctgcagcgtgatgcacgaggccctgcacaatcactacacccagaagagcctgagcctgtcccctggcaagtga

SEQ ID NO: 302 - DNA, 1026 bp, Artificial Sequence
  Synthetic
gacatccagatgacccagagccccagcagcctgagcgcctctgtgggccacagagtgaccatcacctgcagagccagccaggccatcgacagctacctgcactggtatcagcagaagcctggcaaggcccctaagctgctgatctacagcgccagcaatctggagaccggcgtgcctagcagattcagcggcagcggctccggcaccgacttcaccctgaccatcagcagcctgctgcctgaggatttcgccacctactactgccagcaggtggtgtggagacctttcaccttcggccagggcaccaaggtggagatcaagcgggtggagcccaagagcagcgataagacccacacctgccccccctgccctgcccccgagctgctgggcggacccagcgtgttcctgttcccccccaagcctaaggacaccctgatgatcagcagaacccccgaggtgacctgcgtggtggtggatgtgagccacgaggaccctgaggtgaagttcaactggtacgtggacggcgtggaggtgcacaatgccaagaccaagcccagggaggagcagtacaacagcacctaccgggtggtgtccgtgctgaccgtgctgcaccaggattggctgaacggcaaggagtacaagtgcaaggtgtccaacaaggccctgcctgcccctatcgagaaaaccatcagcaaggccaagggccagcccagagagccccaggtgtacaccctgccccctagcagagatgagctgaccaagaaccaggtgtccctgacctgcctggtgaagggcttctaccccagcgacatcgccgtggagtgggagagcaacggccagcccgagaacaactacaagaccaccccccctgtgctggacagcgatggcagcttcttcctgtacagcaagctgaccgtggacaagagcagatggcagcagggcaacgtgttcagctgcagcgtgatgcacgaggccctgcacaatcactacacccagaagagcctgagcctgtcccctggcaagtga

SEQ ID NO: 303 - DNA, 1026 bp, Artificial Sequence
  Synthetic
gacatccagatgacccagagccccagcagcctgagcgcctctgtgggccccagagtgaccatcacctgcagagccagccaggccatcgacagctacctgcactggtatcagcagaagcctggcaaggcccctaagctgctgatctacagcgccagcaatctggagaccggcgtgcctagcagattcagcggcagcggctccggcaccgacttcaccctgaccatcagcagcctgctgcctgaggatttcgccacctactactgccagcaggtggtgtggagacctttcaccttcggccagggcaccaaggtggagatcaagcgggtggagcccaagagcagcgataagacccacacctgccccccctgccctgcccccgagctgctgggcggacccagcgtgttcctgttcccccccaagcctaaggacaccctgatgatcagcagaacccccgaggtgacctgcgtggtggtggatgtgagccacgaggaccctgaggtgaagttcaactggtacgtggacggcgtggaggtgcacaatgccaagaccaagcccagggaggagcagtacaacagcacctaccgggtggtgtccgtgctgaccgtgctgcaccaggattggctgaacggcaaggagtacaagtgcaaggtgtccaacaaggccctgcctgcccctatcgagaaaaccatcagcaaggccaagggccagcccagagagccccaggtgtacaccctgccccctagcagagatgagctgaccaagaaccaggtgtccctgacctgcctggtgaagggcttctaccccagcgacatcgccgtggagtgggagagcaacggccagcccgagaacaactacaagaccaccccccctgtgctggacagcgatggcagcttcttcctgtacagcaagctgaccgtggacaagagcagatggcagcagggcaacgtgttcagctgcagcgtgatgcacgaggccctgcacaatcactacacccagaagagcctgagcctgtcccctggcaagtga

SEQ ID NO: 304 - DNA, 1026 bp, Artificial Sequence
  Synthetic
gacatccagatgacccagagccccagcagcctgagcgcctctgtgggcaagagagtgaccatcacctgcagagccagccaggccatcgacagctacctgcactggtatcagcagaagcctggcaaggcccctaagctgctgatctacagcgccagcaatctggagaccggcgtgcctagcagattcagcggcagcggctccggcaccgacttcaccctgaccatcagcagcctgctgcctgaggatttcgccacctactactgccagcaggtggtgtggagacctttcaccttcggccagggcaccaaggtggagatcaagcgggtggagcccaagagcagcgataagacccacacctgccccccctgccctgcccccgagctgctgggcggacccagcgtgttcctgttcccccccaagcctaaggacaccctgatgatcagcagaacccccgaggtgacctgcgtggtggtggatgtgagccacgaggaccctgaggtgaagttcaactggtacgtggacggcgtggaggtgcacaatgccaagaccaagcccagggaggagcagtacaacagcacctaccgggtggtgtccgtgctgaccgtgctgcaccaggattggctgaacggcaaggagtacaagtgcaaggtgtccaacaaggccctgcctgcccctatcgagaaaaccatcagcaaggccaagggccagcccagagagccccaggtgtacaccctgccccctagcagagatgagctgaccaagaaccaggtgtccctgacctgcctggtgaagggcttctaccccagcgacatcgccgtggagtgggagagcaacggccagcccgagaacaactacaagaccaccccccctgtgctggacagcgatggcagcttcttcctgtacagcaagctgaccgtggacaagagcagatggcagcagggcaacgtgttcagctgcagcgtgatgcacgaggccctgcacaatcactacacccagaagagcctgagcctgtcccctggcaagtga

SEQ ID NO: 305 - DNA, 1026 bp, Artificial Sequence
  Synthetic
gacatccagatgacccagagccccagcagcctgagcgcctctgtgggcgatagcgtgaccatcacctgcagagccagccaggccatcgacagctacctgcactggtatcagcagaagcctggcaaggcccctaagctgctgatctacagcgccagcaatctggagaccggcgtgcctagcagattcagcggcagcggctccggcaccgacttcaccctgaccatcagcagcctgctgcctgaggatttcgccacctactactgccagcaggtggtgtggagacctttcaccttcggccagggcaccaaggtggagatcaagcgggtggagcccaagagcagcgataagacccacacctgccccccctgccctgcccccgagctgctgggcggacccagcgtgttcctgttcccccccaagcctaaggacaccctgatgatcagcagaacccccgaggtgacctgcgtggtggtggatgtgagccacgaggaccctgaggtgaagttcaactggtacgtggacggcgtggaggtgcacaatgccaagaccaagcccagggaggagcagtacaacagcacctaccgggtggtgtccgtgctgaccgtgctgcaccaggattggctgaacggcaaggagtacaagtgcaaggtgtccaacaaggccctgcctgcccctatcgagaaaaccatcagcaaggccaagggccagcccagagagccccaggtgtacaccctgccccctagcagagatgagctgaccaagaaccaggtgtccctgacctgcctggtgaagggcttctaccccagcgacatcgccgtggagtgggagagcaacggccagcccgagaacaactacaagaccaccccccctgtgctggacagcgatggcagcttcttcctgtacagcaagctgaccgtggacaagagcagatggcagcagggcaacgtgttcagctgcagcgtgatgcacgaggccctgcacaatcactacacccagaagagcctgagcctgtcccctggcaagtga

SEQ ID NO: 306 - DNA, 1026 bp, Artificial Sequence
  Synthetic
gacatccagatgacccagagccccagcagcctgagcgcctctgtgggcgatctggtgaccatcacctgcagagccagccaggccatcgacagctacctgcactggtatcagcagaagcctggcaaggcccctaagctgctgatctacagcgccagcaatctggagaccggcgtgcctagcagattcagcggcagcggctccggcaccgacttcaccctgaccatcagcagcctgctgcctgaggatttcgccacctactactgccagcaggtggtgtggagacctttcaccttcggccagggcaccaaggtggagatcaagcgggtggagcccaagagcagcgataagacccacacctgccccccctgccctgcccccgagctgctgggcggacccagcgtgttcctgttcccccccaagcctaaggacaccctgatgatcagcagaacccccgaggtgacctgcgtggtggtggatgtgagccacgaggaccctgaggtgaagttcaactggtacgtggacggcgtggaggtgcacaatgccaagaccaagcccagggaggagcagtacaacagcacctaccgggtggtgtccgtgctgaccgtgctgcaccaggattggctgaacggcaaggagtacaagtgcaaggtgtccaacaaggccctgcctgcccctatcgagaaaaccatcagcaaggccaagggccagcccagagagccccaggtgtacaccctgccccctagcagagatgagctgaccaagaaccaggtgtccctgacctgcctggtgaagggcttctaccccagcgacatcgccgtggagtgggagagcaacggccagcccgagaacaactacaagaccaccccccctgtgctggacagcgatggcagcttcttcctgtacagcaagctgaccgtggacaagagcagatggcagcagggcaacgtgttcagctgcagcgtgatgcacgaggccctgcacaatcactacacccagaagagcctgagcctgtcccctggcaagtga

SEQ ID NO: 307 - DNA, 1026 bp, Artificial Sequence
  Synthetic
gacatccagatgacccagagccccagcagcctgagcgcctctgtgggcgatgacgtgaccatcacctgcagagccagccaggccatcgacagctacctgcactggtatcagcagaagcctggcaaggcccctaagctgctgatctacagcgccagcaatctggagaccggcgtgcctagcagattcagcggcagcggctccggcaccgacttcaccctgaccatcagcagcctgctgcctgaggatttcgccacctactactgccagcaggtggtgtggagacctttcaccttcggccagggcaccaaggtggagatcaagcgggtggagcccaagagcagcgataagacccacacctgccccccctgccctgcccccgagctgctgggcggacccagcgtgttcctgttcccccccaagcctaaggacaccctgatgatcagcagaacccccgaggtgacctgcgtggtggtggatgtgagccacgaggaccctgaggtgaagttcaactggtacgtggacggcgtggaggtgcacaatgccaagaccaagcccagggaggagcagtacaacagcacctaccgggtggtgtccgtgctgaccgtgctgcaccaggattggctgaacggcaaggagtacaagtgcaaggtgtccaacaaggccctgcctgcccctatcgagaaaaccatcagcaaggccaagggccagcccagagagccccaggtgtacaccctgccccctagcagagatgagctgaccaagaaccaggtgtccctgacctgcctggtgaagggcttctaccccagcgacatcgccgtggagtgggagagcaacggccagcccgagaacaactacaagaccaccccccctgtgctggacagcgatggcagcttcttcctgtacagcaagctgaccgtggacaagagcagatggcagcagggcaacgtgttcagctgcagcgtgatgcacgaggccctgcacaatcactacacccagaagagcctgagcctgtcccctggcaagtga

SEQ ID NO: 308 - DNA, 1026 bp, Artificial Sequence
  Synthetic
gacatccagatgacccagagccccagcagcctgagcgcctctgtgggcgatcaggtgaccatcacctgcagagccagccaggccatcgacagctacctgcactggtatcagcagaagcctggcaaggcccctaagctgctgatctacagcgccagcaatctggagaccggcgtgcctagcagattcagcggcagcggctccggcaccgacttcaccctgaccatcagcagcctgctgcctgaggatttcgccacctactactgccagcaggtggtgtggagacctttcaccttcggccagggcaccaaggtggagatcaagcgggtggagcccaagagcagcgataagacccacacctgccccccctgccctgcccccgagctgctgggcggacccagcgtgttcctgttcccccccaagcctaaggacaccctgatgatcagcagaacccccgaggtgacctgcgtggtggtggatgtgagccacgaggaccctgaggtgaagttcaactggtacgtggacggcgtggaggtgcacaatgccaagaccaagcccagggaggagcagtacaacagcacctaccgggtggtgtccgtgctgaccgtgctgcaccaggattggctgaacggcaaggagtacaagtgcaaggtgtccaacaaggccctgcctgcccctatcgagaaaaccatcagcaaggccaagggccagcccagagagccccaggtgtacaccctgccccctagcagagatgagctgaccaagaaccaggtgtccctgacctgcctggtgaagggcttctaccccagcgacatcgccgtggagtgggagagcaacggccagcccgagaacaactacaagaccaccccccctgtgctggacagcgatggcagcttcttcctgtacagcaagctgaccgtggacaagagcagatggcagcagggcaacgtgttcagctgcagcgtgatgcacgaggccctgcacaatcactacacccagaagagcctgagcctgtcccctggcaagtga

SEQ ID NO: 309 - DNA, 1026 bp, Artificial Sequence
  Synthetic
gacatccagatgacccagagccccagcagcctgagcgcctctgtgggcgatcacgtgaccatcacctgcagagccagccaggccatcgacagctacctgcactggtatcagcagaagcctggcaaggcccctaagctgctgatctacagcgccagcaatctggagaccggcgtgcctagcagattcagcggcagcggctccggcaccgacttcaccctgaccatcagcagcctgctgcctgaggatttcgccacctactactgccagcaggtggtgtggagacctttcaccttcggccagggcaccaaggtggagatcaagcgggtggagcccaagagcagcgataagacccacacctgccccccctgccctgcccccgagctgctgggcggacccagcgtgttcctgttcccccccaagcctaaggacaccctgatgatcagcagaacccccgaggtgacctgcgtggtggtggatgtgagccacgaggaccctgaggtgaagttcaactggtacgtggacggcgtggaggtgcacaatgccaagaccaagcccagggaggagcagtacaacagcacctaccgggtggtgtccgtgctgaccgtgctgcaccaggattggctgaacggcaaggagtacaagtgcaaggtgtccaacaaggccctgcctgcccctatcgagaaaaccatcagcaaggccaagggccagcccagagagccccaggtgtacaccctgccccctagcagagatgagctgaccaagaaccaggtgtccctgacctgcctggtgaagggcttctaccccagcgacatcgccgtggagtgggagagcaacggccagcccgagaacaactacaagaccaccccccctgtgctggacagcgatggcagcttcttcctgtacagcaagctgaccgtggacaagagcagatggcagcagggcaacgtgttcagctgcagcgtgatgcacgaggccctgcacaatcactacacccagaagagcctgagcctgtcccctggcaagtga

SEQ ID NO: 310 - DNA, 1026 bp, Artificial Sequence
  Synthetic
gacatccagatgacccagagccccagcagcctgagcgcctctgtgggcgatagaagcaccatcacctgcagagccagccaggccatcgacagctacctgcactggtatcagcagaagcctggcaaggcccctaagctgctgatctacagcgccagcaatctggagaccggcgtgcctagcagattcagcggcagcggctccggcaccgacttcaccctgaccatcagcagcctgctgcctgaggatttcgccacctactactgccagcaggtggtgtggagacctttcaccttcggccagggcaccaaggtggagatcaagcgggtggagcccaagagcagcgataagacccacacctgccccccctgccctgcccccgagctgctgggcggacccagcgtgttcctgttcccccccaagcctaaggacaccctgatgatcagcagaacccccgaggtgacctgcgtggtggtggatgtgagccacgaggaccctgaggtgaagttcaactggtacgtggacggcgtggaggtgcacaatgccaagaccaagcccagggaggagcagtacaacagcacctaccgggtggtgtccgtgctgaccgtgctgcaccaggattggctgaacggcaaggagtacaagtgcaaggtgtccaacaaggccctgcctgcccctatcgagaaaaccatcagcaaggccaagggccagcccagagagccccaggtgtacaccctgccccctagcagagatgagctgaccaagaaccaggtgtccctgacctgcctggtgaagggcttctaccccagcgacatcgccgtggagtgggagagcaacggccagcccgagaacaactacaagaccaccccccctgtgctggacagcgatggcagcttcttcctgtacagcaagctgaccgtggacaagagcagatggcagcagggcaacgtgttcagctgcagcgtgatgcacgaggccctgcacaatcactacacccagaagagcctgagcctgtcccctggcaagtga

SEQ ID NO: 311 - DNA, 1026 bp, Artificial Sequence
  Synthetic
gacatccagatgacccagagccccagcagcctgagcgcctctgtgggcgatagagacaccatcacctgcagagccagccaggccatcgacagctacctgcactggtatcagcagaagcctggcaaggcccctaagctgctgatctacagcgccagcaatctggagaccggcgtgcctagcagattcagcggcagcggctccggcaccgacttcaccctgaccatcagcagcctgctgcctgaggatttcgccacctactactgccagcaggtggtgtggagacctttcaccttcggccagggcaccaaggtggagatcaagcgggtggagcccaagagcagcgataagacccacacctgccccccctgccctgcccccgagctgctgggcggacccagcgtgttcctgttcccccccaagcctaaggacaccctgatgatcagcagaacccccgaggtgacctgcgtggtggtggatgtgagccacgaggaccctgaggtgaagttcaactggtacgtggacggcgtggaggtgcacaatgccaagaccaagcccagggaggagcagtacaacagcacctaccgggtggtgtccgtgctgaccgtgctgcaccaggattggctgaacggcaaggagtacaagtgcaaggtgtccaacaaggccctgcctgcccctatcgagaaaaccatcagcaaggccaagggccagcccagagagccccaggtgtacaccctgccccctagcagagatgagctgaccaagaaccaggtgtccctgacctgcctggtgaagggcttctaccccagcgacatcgccgtggagtgggagagcaacggccagcccgagaacaactacaagaccaccccccctgtgctggacagcgatggcagcttcttcctgtacagcaagctgaccgtggacaagagcagatggcagcagggcaacgtgttcagctgcagcgtgatgcacgaggccctgcacaatcactacacccagaagagcctgagcctgtcccctggcaagtga

SEQ ID NO: 312 - DNA, 1026 bp, Artificial Sequence
  Synthetic
gacatccagatgacccagagccccagcagcctgagcgcctctgtgggcgatagacagaccatcacctgcagagccagccaggccatcgacagctacctgcactggtatcagcagaagcctggcaaggcccctaagctgctgatctacagcgccagcaatctggagaccggcgtgcctagcagattcagcggcagcggctccggcaccgacttcaccctgaccatcagcagcctgctgcctgaggatttcgccacctactactgccagcaggtggtgtggagacctttcaccttcggccagggcaccaaggtggagatcaagcgggtggagcccaagagcagcgataagacccacacctgccccccctgccctgcccccgagctgctgggcggacccagcgtgttcctgttcccccccaagcctaaggacaccctgatgatcagcagaacccccgaggtgacctgcgtggtggtggatgtgagccacgaggaccctgaggtgaagttcaactggtacgtggacggcgtggaggtgcacaatgccaagaccaagcccagggaggagcagtacaacagcacctaccgggtggtgtccgtgctgaccgtgctgcaccaggattggctgaacggcaaggagtacaagtgcaaggtgtccaacaaggccctgcctgcccctatcgagaaaaccatcagcaaggccaagggccagcccagagagccccaggtgtacaccctgccccctagcagagatgagctgaccaagaaccaggtgtccctgacctgcctggtgaagggcttctaccccagcgacatcgccgtggagtgggagagcaacggccagcccgagaacaactacaagaccaccccccctgtgctggacagcgatggcagcttcttcctgtacagcaagctgaccgtggacaagagcagatggcagcagggcaacgtgttcagctgcagcgtgatgcacgaggccctgcacaatcactacacccagaagagcctgagcctgtcccctggcaagtga

SEQ ID NO: 313 - DNA, 1026 bp, Artificial Sequence
  Synthetic
gacatccagatgacccagagccccagcagcctgagcgcctctgtgggcgatagacacaccatcacctgcagagccagccaggccatcgacagctacctgcactggtatcagcagaagcctggcaaggcccctaagctgctgatctacagcgccagcaatctggagaccggcgtgcctagcagattcagcggcagcggctccggcaccgacttcaccctgaccatcagcagcctgctgcctgaggatttcgccacctactactgccagcaggtggtgtggagacctttcaccttcggccagggcaccaaggtggagatcaagcgggtggagcccaagagcagcgataagacccacacctgccccccctgccctgcccccgagctgctgggcggacccagcgtgttcctgttcccccccaagcctaaggacaccctgatgatcagcagaacccccgaggtgacctgcgtggtggtggatgtgagccacgaggaccctgaggtgaagttcaactggtacgtggacggcgtggaggtgcacaatgccaagaccaagcccagggaggagcagtacaacagcacctaccgggtggtgtccgtgctgaccgtgctgcaccaggattggctgaacggcaaggagtacaagtgcaaggtgtccaacaaggccctgcctgcccctatcgagaaaaccatcagcaaggccaagggccagcccagagagccccaggtgtacaccctgccccctagcagagatgagctgaccaagaaccaggtgtccctgacctgcctggtgaagggcttctaccccagcgacatcgccgtggagtgggagagcaacggccagcccgagaacaactacaagaccaccccccctgtgctggacagcgatggcagcttcttcctgtacagcaagctgaccgtggacaagagcagatggcagcagggcaacgtgttcagctgcagcgtgatgcacgaggccctgcacaatcactacacccagaagagcctgagcctgtcccctggcaagtga

SEQ ID NO: 314 - DNA, 1026 bp, Artificial Sequence
  Synthetic
gacatccagatgacccagagccccagcagcctgagcgcctctgtgggcgatagacccaccatcacctgcagagccagccaggccatcgacagctacctgcactggtatcagcagaagcctggcaaggcccctaagctgctgatctacagcgccagcaatctggagaccggcgtgcctagcagattcagcggcagcggctccggcaccgacttcaccctgaccatcagcagcctgctgcctgaggatttcgccacctactactgccagcaggtggtgtggagacctttcaccttcggccagggcaccaaggtggagatcaagcgggtggagcccaagagcagcgataagacccacacctgccccccctgccctgcccccgagctgctgggcggacccagcgtgttcctgttcccccccaagcctaaggacaccctgatgatcagcagaacccccgaggtgacctgcgtggtggtggatgtgagccacgaggaccctgaggtgaagttcaactggtacgtggacggcgtggaggtgcacaatgccaagaccaagcccagggaggagcagtacaacagcacctaccgggtggtgtccgtgctgaccgtgctgcaccaggattggctgaacggcaaggagtacaagtgcaaggtgtccaacaaggccctgcctgcccctatcgagaaaaccatcagcaaggccaagggccagcccagagagccccaggtgtacaccctgccccctagcagagatgagctgaccaagaaccaggtgtccctgacctgcctggtgaagggcttctaccccagcgacatcgccgtggagtgggagagcaacggccagcccgagaacaactacaagaccaccccccctgtgctggacagcgatggcagcttcttcctgtacagcaagctgaccgtggacaagagcagatggcagcagggcaacgtgttcagctgcagcgtgatgcacgaggccctgcacaatcactacacccagaagagcctgagcctgtcccctggcaagtga

SEQ ID NO: 315 - DNA, 1026 bp, Artificial Sequence
  Synthetic
gacatccagatgacccagagccccagcagcctgagcgcctctgtgggcgatagaaagaccatcacctgcagagccagccaggccatcgacagctacctgcactggtatcagcagaagcctggcaaggcccctaagctgctgatctacagcgccagcaatctggagaccggcgtgcctagcagattcagcggcagcggctccggcaccgacttcaccctgaccatcagcagcctgctgcctgaggatttcgccacctactactgccagcaggtggtgtggagacctttcaccttcggccagggcaccaaggtggagatcaagcgggtggagcccaagagcagcgataagacccacacctgccccccctgccctgcccccgagctgctgggcggacccagcgtgttcctgttcccccccaagcctaaggacaccctgatgatcagcagaacccccgaggtgacctgcgtggtggtggatgtgagccacgaggaccctgaggtgaagttcaactggtacgtggacggcgtggaggtgcacaatgccaagaccaagcccagggaggagcagtacaacagcacctaccgggtggtgtccgtgctgaccgtgctgcaccaggattggctgaacggcaaggagtacaagtgcaaggtgtccaacaaggccctgcctgcccctatcgagaaaaccatcagcaaggccaagggccagcccagagagccccaggtgtacaccctgccccctagcagagatgagctgaccaagaaccaggtgtccctgacctgcctggtgaagggcttctaccccagcgacatcgccgtggagtgggagagcaacggccagcccgagaacaactacaagaccaccccccctgtgctggacagcgatggcagcttcttcctgtacagcaagctgaccgtggacaagagcagatggcagcagggcaacgtgttcagctgcagcgtgatgcacgaggccctgcacaatcactacacccagaagagcctgagcctgtcccctggcaagtga

SEQ ID NO: 316 - DNA, 1026 bp, Artificial Sequence
  Synthetic
gacatccagatgacccagagccccagcagcctgagcgcctctgtgggcgatagagtgctgatcacctgcagagccagccaggccatcgacagctacctgcactggtatcagcagaagcctggcaaggcccctaagctgctgatctacagcgccagcaatctggagaccggcgtgcctagcagattcagcggcagcggctccggcaccgacttcaccctgaccatcagcagcctgctgcctgaggatttcgccacctactactgccagcaggtggtgtggagacctttcaccttcggccagggcaccaaggtggagatcaagcgggtggagcccaagagcagcgataagacccacacctgccccccctgccctgcccccgagctgctgggcggacccagcgtgttcctgttcccccccaagcctaaggacaccctgatgatcagcagaacccccgaggtgacctgcgtggtggtggatgtgagccacgaggaccctgaggtgaagttcaactggtacgtggacggcgtggaggtgcacaatgccaagaccaagcccagggaggagcagtacaacagcacctaccgggtggtgtccgtgctgaccgtgctgcaccaggattggctgaacggcaaggagtacaagtgcaaggtgtccaacaaggccctgcctgcccctatcgagaaaaccatcagcaaggccaagggccagcccagagagccccaggtgtacaccctgccccctagcagagatgagctgaccaagaaccaggtgtccctgacctgcctggtgaagggcttctaccccagcgacatcgccgtggagtgggagagcaacggccagcccgagaacaactacaagaccaccccccctgtgctggacagcgatggcagcttcttcctgtacagcaagctgaccgtggacaagagcagatggcagcagggcaacgtgttcagctgcagcgtgatgcacgaggccctgcacaatcactacacccagaagagcctgagcctgtcccctggcaagtga

SEQ ID NO: 317 - DNA, 1026 bp, Artificial Sequence
  Synthetic
gacatccagatgacccagagccccagcagcctgagcgcctctgtgggcgatagagtgtacatcacctgcagagccagccaggccatcgacagctacctgcactggtatcagcagaagcctggcaaggcccctaagctgctgatctacagcgccagcaatctggagaccggcgtgcctagcagattcagcggcagcggctccggcaccgacttcaccctgaccatcagcagcctgctgcctgaggatttcgccacctactactgccagcaggtggtgtggagacctttcaccttcggccagggcaccaaggtggagatcaagcgggtggagcccaagagcagcgataagacccacacctgccccccctgccctgcccccgagctgctgggcggacccagcgtgttcctgttcccccccaagcctaaggacaccctgatgatcagcagaacccccgaggtgacctgcgtggtggtggatgtgagccacgaggaccctgaggtgaagttcaactggtacgtggacggcgtggaggtgcacaatgccaagaccaagcccagggaggagcagtacaacagcacctaccgggtggtgtccgtgctgaccgtgctgcaccaggattggctgaacggcaaggagtacaagtgcaaggtgtccaacaaggccctgcctgcccctatcgagaaaaccatcagcaaggccaagggccagcccagagagccccaggtgtacaccctgccccctagcagagatgagctgaccaagaaccaggtgtccctgacctgcctggtgaagggcttctaccccagcgacatcgccgtggagtgggagagcaacggccagcccgagaacaactacaagaccaccccccctgtgctggacagcgatggcagcttcttcctgtacagcaagctgaccgtggacaagagcagatggcagcagggcaacgtgttcagctgcagcgtgatgcacgaggccctgcacaatcactacacccagaagagcctgagcctgtcccctggcaagtga

SEQ ID NO: 318 - DNA, 1026 bp, Artificial Sequence
  Synthetic
gacatccagatgacccagagccccagcagcctgagcgcctctgtgggcgatagagtggacatcacctgcagagccagccaggccatcgacagctacctgcactggtatcagcagaagcctggcaaggcccctaagctgctgatctacagcgccagcaatctggagaccggcgtgcctagcagattcagcggcagcggctccggcaccgacttcaccctgaccatcagcagcctgctgcctgaggatttcgccacctactactgccagcaggtggtgtggagacctttcaccttcggccagggcaccaaggtggagatcaagcgggtggagcccaagagcagcgataagacccacacctgccccccctgccctgcccccgagctgctgggcggacccagcgtgttcctgttcccccccaagcctaaggacaccctgatgatcagcagaacccccgaggtgacctgcgtggtggtggatgtgagccacgaggaccctgaggtgaagttcaactggtacgtggacggcgtggaggtgcacaatgccaagaccaagcccagggaggagcagtacaacagcacctaccgggtggtgtccgtgctgaccgtgctgcaccaggattggctgaacggcaaggagtacaagtgcaaggtgtccaacaaggccctgcctgcccctatcgagaaaaccatcagcaaggccaagggccagcccagagagccccaggtgtacaccctgccccctagcagagatgagctgaccaagaaccaggtgtccctgacctgcctggtgaagggcttctaccccagcgacatcgccgtggagtgggagagcaacggccagcccgagaacaactacaagaccaccccccctgtgctggacagcgatggcagcttcttcctgtacagcaagctgaccgtggacaagagcagatggcagcagggcaacgtgttcagctgcagcgtgatgcacgaggccctgcacaatcactacacccagaagagcctgagcctgtcccctggcaagtga

SEQ ID NO: 319 - DNA, 1026 bp, Artificial Sequence
  Synthetic
gacatccagatgacccagagccccagcagcctgagcgcctctgtgggcgatagagtgcagatcacctgcagagccagccaggccatcgacagctacctgcactggtatcagcagaagcctggcaaggcccctaagctgctgatctacagcgccagcaatctggagaccggcgtgcctagcagattcagcggcagcggctccggcaccgacttcaccctgaccatcagcagcctgctgcctgaggatttcgccacctactactgccagcaggtggtgtggagacctttcaccttcggccagggcaccaaggtggagatcaagcgggtggagcccaagagcagcgataagacccacacctgccccccctgccctgcccccgagctgctgggcggacccagcgtgttcctgttcccccccaagcctaaggacaccctgatgatcagcagaacccccgaggtgacctgcgtggtggtggatgtgagccacgaggaccctgaggtgaagttcaactggtacgtggacggcgtggaggtgcacaatgccaagaccaagcccagggaggagcagtacaacagcacctaccgggtggtgtccgtgctgaccgtgctgcaccaggattggctgaacggcaaggagtacaagtgcaaggtgtccaacaaggccctgcctgcccctatcgagaaaaccatcagcaaggccaagggccagcccagagagccccaggtgtacaccctgccccctagcagagatgagctgaccaagaaccaggtgtccctgacctgcctggtgaagggcttctaccccagcgacatcgccgtggagtgggagagcaacggccagcccgagaacaactacaagaccaccccccctgtgctggacagcgatggcagcttcttcctgtacagcaagctgaccgtggacaagagcagatggcagcagggcaacgtgttcagctgcagcgtgatgcacgaggccctgcacaatcactacacccagaagagcctgagcctgtcccctggcaagtga

SEQ ID NO: 320 - DNA, 1026 bp, Artificial Sequence
  Synthetic
gacatccagatgacccagagccccagcagcctgagcgcctctgtgggcgatagagtgcacatcacctgcagagccagccaggccatcgacagctacctgcactggtatcagcagaagcctggcaaggcccctaagctgctgatctacagcgccagcaatctggagaccggcgtgcctagcagattcagcggcagcggctccggcaccgacttcaccctgaccatcagcagcctgctgcctgaggatttcgccacctactactgccagcaggtggtgtggagacctttcaccttcggccagggcaccaaggtggagatcaagcgggtggagcccaagagcagcgataagacccacacctgccccccctgccctgcccccgagctgctgggcggacccagcgtgttcctgttcccccccaagcctaaggacaccctgatgatcagcagaacccccgaggtgacctgcgtggtggtggatgtgagccacgaggaccctgaggtgaagttcaactggtacgtggacggcgtggaggtgcacaatgccaagaccaagcccagggaggagcagtacaacagcacctaccgggtggtgtccgtgctgaccgtgctgcaccaggattggctgaacggcaaggagtacaagtgcaaggtgtccaacaaggccctgcctgcccctatcgagaaaaccatcagcaaggccaagggccagcccagagagccccaggtgtacaccctgccccctagcagagatgagctgaccaagaaccaggtgtccctgacctgcctggtgaagggcttctaccccagcgacatcgccgtggagtgggagagcaacggccagcccgagaacaactacaagaccaccccccctgtgctggacagcgatggcagcttcttcctgtacagcaagctgaccgtggacaagagcagatggcagcagggcaacgtgttcagctgcagcgtgatgcacgaggccctgcacaatcactacacccagaagagcctgagcctgtcccctggcaagtga

SEQ ID NO: 321 - DNA, 1026 bp, Artificial Sequence
  Synthetic
gacatccagatgacccagagccccagcagcctgagcgcctctgtgggcgatagagtgcccatcacctgcagagccagccaggccatcgacagctacctgcactggtatcagcagaagcctggcaaggcccctaagctgctgatctacagcgccagcaatctggagaccggcgtgcctagcagattcagcggcagcggctccggcaccgacttcaccctgaccatcagcagcctgctgcctgaggatttcgccacctactactgccagcaggtggtgtggagacctttcaccttcggccagggcaccaaggtggagatcaagcgggtggagcccaagagcagcgataagacccacacctgccccccctgccctgcccccgagctgctgggcggacccagcgtgttcctgttcccccccaagcctaaggacaccctgatgatcagcagaacccccgaggtgacctgcgtggtggtggatgtgagccacgaggaccctgaggtgaagttcaactggtacgtggacggcgtggaggtgcacaatgccaagaccaagcccagggaggagcagtacaacagcacctaccgggtggtgtccgtgctgaccgtgctgcaccaggattggctgaacggcaaggagtacaagtgcaaggtgtccaacaaggccctgcctgcccctatcgagaaaaccatcagcaaggccaagggccagcccagagagccccaggtgtacaccctgccccctagcagagatgagctgaccaagaaccaggtgtccctgacctgcctggtgaagggcttctaccccagcgacatcgccgtggagtgggagagcaacggccagcccgagaacaactacaagaccaccccccctgtgctggacagcgatggcagcttcttcctgtacagcaagctgaccgtggacaagagcagatggcagcagggcaacgtgttcagctgcagcgtgatgcacgaggccctgcacaatcactacacccagaagagcctgagcctgtcccctggcaagtga

SEQ ID NO: 322 - DNA, 1026 bp, Artificial Sequence
  Synthetic
gacatccagatgacccagagccccagcagcctgagcgcctctgtgggcgatagagtgaagatcacctgcagagccagccaggccatcgacagctacctgcactggtatcagcagaagcctggcaaggcccctaagctgctgatctacagcgccagcaatctggagaccggcgtgcctagcagattcagcggcagcggctccggcaccgacttcaccctgaccatcagcagcctgctgcctgaggatttcgccacctactactgccagcaggtggtgtggagacctttcaccttcggccagggcaccaaggtggagatcaagcgggtggagcccaagagcagcgataagacccacacctgccccccctgccctgcccccgagctgctgggcggacccagcgtgttcctgttcccccccaagcctaaggacaccctgatgatcagcagaacccccgaggtgacctgcgtggtggtggatgtgagccacgaggaccctgaggtgaagttcaactggtacgtggacggcgtggaggtgcacaatgccaagaccaagcccagggaggagcagtacaacagcacctaccgggtggtgtccgtgctgaccgtgctgcaccaggattggctgaacggcaaggagtacaagtgcaaggtgtccaacaaggccctgcctgcccctatcgagaaaaccatcagcaaggccaagggccagcccagagagccccaggtgtacaccctgccccctagcagagatgagctgaccaagaaccaggtgtccctgacctgcctggtgaagggcttctaccccagcgacatcgccgtggagtgggagagcaacggccagcccgagaacaactacaagaccaccccccctgtgctggacagcgatggcagcttcttcctgtacagcaagctgaccgtggacaagagcagatggcagcagggcaacgtgttcagctgcagcgtgatgcacgaggccctgcacaatcactacacccagaagagcctgagcctgtcccctggcaagtga

SEQ ID NO: 323 - DNA, 1026 bp, Artificial Sequence
  Synthetic
gacatccagatgacccagagccccagcagcctgagcgcctctgtgggcgatagagtgaccagcacctgcagagccagccaggccatcgacagctacctgcactggtatcagcagaagcctggcaaggcccctaagctgctgatctacagcgccagcaatctggagaccggcgtgcctagcagattcagcggcagcggctccggcaccgacttcaccctgaccatcagcagcctgctgcctgaggatttcgccacctactactgccagcaggtggtgtggagacctttcaccttcggccagggcaccaaggtggagatcaagcgggtggagcccaagagcagcgataagacccacacctgccccccctgccctgcccccgagctgctgggcggacccagcgtgttcctgttcccccccaagcctaaggacaccctgatgatcagcagaacccccgaggtgacctgcgtggtggtggatgtgagccacgaggaccctgaggtgaagttcaactggtacgtggacggcgtggaggtgcacaatgccaagaccaagcccagggaggagcagtacaacagcacctaccgggtggtgtccgtgctgaccgtgctgcaccaggattggctgaacggcaaggagtacaagtgcaaggtgtccaacaaggccctgcctgcccctatcgagaaaaccatcagcaaggccaagggccagcccagagagccccaggtgtacaccctgccccctagcagagatgagctgaccaagaaccaggtgtccctgacctgcctggtgaagggcttctaccccagcgacatcgccgtggagtgggagagcaacggccagcccgagaacaactacaagaccaccccccctgtgctggacagcgatggcagcttcttcctgtacagcaagctgaccgtggacaagagcagatggcagcagggcaacgtgttcagctgcagcgtgatgcacgaggccctgcacaatcactacacccagaagagcctgagcctgtcccctggcaagtga

SEQ ID NO: 324 - DNA, 1026 bp, Artificial Sequence
  Synthetic
gacatccagatgacccagagccccagcagcctgagcgcctctgtgggcgatagagtgacctacacctgcagagccagccaggccatcgacagctacctgcactggtatcagcagaagcctggcaaggcccctaagctgctgatctacagcgccagcaatctggagaccggcgtgcctagcagattcagcggcagcggctccggcaccgacttcaccctgaccatcagcagcctgctgcctgaggatttcgccacctactactgccagcaggtggtgtggagacctttcaccttcggccagggcaccaaggtggagatcaagcgggtggagcccaagagcagcgataagacccacacctgccccccctgccctgcccccgagctgctgggcggacccagcgtgttcctgttcccccccaagcctaaggacaccctgatgatcagcagaacccccgaggtgacctgcgtggtggtggatgtgagccacgaggaccctgaggtgaagttcaactggtacgtggacggcgtggaggtgcacaatgccaagaccaagcccagggaggagcagtacaacagcacctaccgggtggtgtccgtgctgaccgtgctgcaccaggattggctgaacggcaaggagtacaagtgcaaggtgtccaacaaggccctgcctgcccctatcgagaaaaccatcagcaaggccaagggccagcccagagagccccaggtgtacaccctgccccctagcagagatgagctgaccaagaaccaggtgtccctgacctgcctggtgaagggcttctaccccagcgacatcgccgtggagtgggagagcaacggccagcccgagaacaactacaagaccaccccccctgtgctggacagcgatggcagcttcttcctgtacagcaagctgaccgtggacaagagcagatggcagcagggcaacgtgttcagctgcagcgtgatgcacgaggccctgcacaatcactacacccagaagagcctgagcctgtcccctggcaagtga

SEQ ID NO: 325 - DNA, 1026 bp, Artificial Sequence
  Synthetic
gacatccagatgacccagagccccagcagcctgagcgcctctgtgggcgatagagtgaccgacacctgcagagccagccaggccatcgacagctacctgcactggtatcagcagaagcctggcaaggcccctaagctgctgatctacagcgccagcaatctggagaccggcgtgcctagcagattcagcggcagcggctccggcaccgacttcaccctgaccatcagcagcctgctgcctgaggatttcgccacctactactgccagcaggtggtgtggagacctttcaccttcggccagggcaccaaggtggagatcaagcgggtggagcccaagagcagcgataagacccacacctgccccccctgccctgcccccgagctgctgggcggacccagcgtgttcctgttcccccccaagcctaaggacaccctgatgatcagcagaacccccgaggtgacctgcgtggtggtggatgtgagccacgaggaccctgaggtgaagttcaactggtacgtggacggcgtggaggtgcacaatgccaagaccaagcccagggaggagcagtacaacagcacctaccgggtggtgtccgtgctgaccgtgctgcaccaggattggctgaacggcaaggagtacaagtgcaaggtgtccaacaaggccctgcctgcccctatcgagaaaaccatcagcaaggccaagggccagcccagagagccccaggtgtacaccctgccccctagcagagatgagctgaccaagaaccaggtgtccctgacctgcctggtgaagggcttctaccccagcgacatcgccgtggagtgggagagcaacggccagcccgagaacaactacaagaccaccccccctgtgctggacagcgatggcagcttcttcctgtacagcaagctgaccgtggacaagagcagatggcagcagggcaacgtgttcagctgcagcgtgatgcacgaggccctgcacaatcactacacccagaagagcctgagcctgtcccctggcaagtga

SEQ ID NO: 326 - DNA, 1026 bp, Artificial Sequence
  Synthetic
gacatccagatgacccagagccccagcagcctgagcgcctctgtgggcgatagagtgacccagacctgcagagccagccaggccatcgacagctacctgcactggtatcagcagaagcctggcaaggcccctaagctgctgatctacagcgccagcaatctggagaccggcgtgcctagcagattcagcggcagcggctccggcaccgacttcaccctgaccatcagcagcctgctgcctgaggatttcgccacctactactgccagcaggtggtgtggagacctttcaccttcggccagggcaccaaggtggagatcaagcgggtggagcccaagagcagcgataagacccacacctgccccccctgccctgcccccgagctgctgggcggacccagcgtgttcctgttcccccccaagcctaaggacaccctgatgatcagcagaacccccgaggtgacctgcgtggtggtggatgtgagccacgaggaccctgaggtgaagttcaactggtacgtggacggcgtggaggtgcacaatgccaagaccaagcccagggaggagcagtacaacagcacctaccgggtggtgtccgtgctgaccgtgctgcaccaggattggctgaacggcaaggagtacaagtgcaaggtgtccaacaaggccctgcctgcccctatcgagaaaaccatcagcaaggccaagggccagcccagagagccccaggtgtacaccctgccccctagcagagatgagctgaccaagaaccaggtgtccctgacctgcctggtgaagggcttctaccccagcgacatcgccgtggagtgggagagcaacggccagcccgagaacaactacaagaccaccccccctgtgctggacagcgatggcagcttcttcctgtacagcaagctgaccgtggacaagagcagatggcagcagggcaacgtgttcagctgcagcgtgatgcacgaggccctgcacaatcactacacccagaagagcctgagcctgtcccctggcaagtga

SEQ ID NO: 327 - DNA, 1026 bp, Artificial Sequence
  Synthetic
gacatccagatgacccagagccccagcagcctgagcgcctctgtgggcgatagagtgacccacacctgcagagccagccaggccatcgacagctacctgcactggtatcagcagaagcctggcaaggcccctaagctgctgatctacagcgccagcaatctggagaccggcgtgcctagcagattcagcggcagcggctccggcaccgacttcaccctgaccatcagcagcctgctgcctgaggatttcgccacctactactgccagcaggtggtgtggagacctttcaccttcggccagggcaccaaggtggagatcaagcgggtggagcccaagagcagcgataagacccacacctgccccccctgccctgcccccgagctgctgggcggacccagcgtgttcctgttcccccccaagcctaaggacaccctgatgatcagcagaacccccgaggtgacctgcgtggtggtggatgtgagccacgaggaccctgaggtgaagttcaactggtacgtggacggcgtggaggtgcacaatgccaagaccaagcccagggaggagcagtacaacagcacctaccgggtggtgtccgtgctgaccgtgctgcaccaggattggctgaacggcaaggagtacaagtgcaaggtgtccaacaaggccctgcctgcccctatcgagaaaaccatcagcaaggccaagggccagcccagagagccccaggtgtacaccctgccccctagcagagatgagctgaccaagaaccaggtgtccctgacctgcctggtgaagggcttctaccccagcgacatcgccgtggagtgggagagcaacggccagcccgagaacaactacaagaccaccccccctgtgctggacagcgatggcagcttcttcctgtacagcaagctgaccgtggacaagagcagatggcagcagggcaacgtgttcagctgcagcgtgatgcacgaggccctgcacaatcactacacccagaagagcctgagcctgtcccctggcaagtga

SEQ ID NO: 328 - DNA, 1026 bp, Artificial Sequence
  Synthetic
gacatccagatgacccagagccccagcagcctgagcgcctctgtgggcgatagagtgacccccacctgcagagccagccaggccatcgacagctacctgcactggtatcagcagaagcctggcaaggcccctaagctgctgatctacagcgccagcaatctggagaccggcgtgcctagcagattcagcggcagcggctccggcaccgacttcaccctgaccatcagcagcctgctgcctgaggatttcgccacctactactgccagcaggtggtgtggagacctttcaccttcggccagggcaccaaggtggagatcaagcgggtggagcccaagagcagcgataagacccacacctgccccccctgccctgcccccgagctgctgggcggacccagcgtgttcctgttcccccccaagcctaaggacaccctgatgatcagcagaacccccgaggtgacctgcgtggtggtggatgtgagccacgaggaccctgaggtgaagttcaactggtacgtggacggcgtggaggtgcacaatgccaagaccaagcccagggaggagcagtacaacagcacctaccgggtggtgtccgtgctgaccgtgctgcaccaggattggctgaacggcaaggagtacaagtgcaaggtgtccaacaaggccctgcctgcccctatcgagaaaaccatcagcaaggccaagggccagcccagagagccccaggtgtacaccctgccccctagcagagatgagctgaccaagaaccaggtgtccctgacctgcctggtgaagggcttctaccccagcgacatcgccgtggagtgggagagcaacggccagcccgagaacaactacaagaccaccccccctgtgctggacagcgatggcagcttcttcctgtacagcaagctgaccgtggacaagagcagatggcagcagggcaacgtgttcagctgcagcgtgatgcacgaggccctgcacaatcactacacccagaagagcctgagcctgtcccctggcaagtga

SEQ ID NO: 329 - DNA, 1026 bp, Artificial Sequence
  Synthetic
gacatccagatgacccagagccccagcagcctgagcgcctctgtgggcgatagagtgaccaagacctgcagagccagccaggccatcgacagctacctgcactggtatcagcagaagcctggcaaggcccctaagctgctgatctacagcgccagcaatctggagaccggcgtgcctagcagattcagcggcagcggctccggcaccgacttcaccctgaccatcagcagcctgctgcctgaggatttcgccacctactactgccagcaggtggtgtggagacctttcaccttcggccagggcaccaaggtggagatcaagcgggtggagcccaagagcagcgataagacccacacctgccccccctgccctgcccccgagctgctgggcggacccagcgtgttcctgttcccccccaagcctaaggacaccctgatgatcagcagaacccccgaggtgacctgcgtggtggtggatgtgagccacgaggaccctgaggtgaagttcaactggtacgtggacggcgtggaggtgcacaatgccaagaccaagcccagggaggagcagtacaacagcacctaccgggtggtgtccgtgctgaccgtgctgcaccaggattggctgaacggcaaggagtacaagtgcaaggtgtccaacaaggccctgcctgcccctatcgagaaaaccatcagcaaggccaagggccagcccagagagccccaggtgtacaccctgccccctagcagagatgagctgaccaagaaccaggtgtccctgacctgcctggtgaagggcttctaccccagcgacatcgccgtggagtgggagagcaacggccagcccgagaacaactacaagaccaccccccctgtgctggacagcgatggcagcttcttcctgtacagcaagctgaccgtggacaagagcagatggcagcagggcaacgtgttcagctgcagcgtgatgcacgaggccctgcacaatcactacacccagaagagcctgagcctgtcccctggcaagtga

SEQ ID NO: 330 - DNA, 1026 bp, Artificial Sequence
  Synthetic
gacatccagatgacccagagccccagcagcctgagcgcctctgtgggcgatagagtgaccatcctgtgcagagccagccaggccatcgacagctacctgcactggtatcagcagaagcctggcaaggcccctaagctgctgatctacagcgccagcaatctggagaccggcgtgcctagcagattcagcggcagcggctccggcaccgacttcaccctgaccatcagcagcctgctgcctgaggatttcgccacctactactgccagcaggtggtgtggagacctttcaccttcggccagggcaccaaggtggagatcaagcgggtggagcccaagagcagcgataagacccacacctgccccccctgccctgcccccgagctgctgggcggacccagcgtgttcctgttcccccccaagcctaaggacaccctgatgatcagcagaacccccgaggtgacctgcgtggtggtggatgtgagccacgaggaccctgaggtgaagttcaactggtacgtggacggcgtggaggtgcacaatgccaagaccaagcccagggaggagcagtacaacagcacctaccgggtggtgtccgtgctgaccgtgctgcaccaggattggctgaacggcaaggagtacaagtgcaaggtgtccaacaaggccctgcctgcccctatcgagaaaaccatcagcaaggccaagggccagcccagagagccccaggtgtacaccctgccccctagcagagatgagctgaccaagaaccaggtgtccctgacctgcctggtgaagggcttctaccccagcgacatcgccgtggagtgggagagcaacggccagcccgagaacaactacaagaccaccccccctgtgctggacagcgatggcagcttcttcctgtacagcaagctgaccgtggacaagagcagatggcagcagggcaacgtgttcagctgcagcgtgatgcacgaggccctgcacaatcactacacccagaagagcctgagcctgtcccctggcaagtga

SEQ ID NO: 331 - DNA, 1026 bp, Artificial Sequence
  Synthetic
gacatccagatgacccagagccccagcagcctgagcgcctctgtgggcgatagagtgaccatctactgcagagccagccaggccatcgacagctacctgcactggtatcagcagaagcctggcaaggcccctaagctgctgatctacagcgccagcaatctggagaccggcgtgcctagcagattcagcggcagcggctccggcaccgacttcaccctgaccatcagcagcctgctgcctgaggatttcgccacctactactgccagcaggtggtgtggagacctttcaccttcggccagggcaccaaggtggagatcaagcgggtggagcccaagagcagcgataagacccacacctgccccccctgccctgcccccgagctgctgggcggacccagcgtgttcctgttcccccccaagcctaaggacaccctgatgatcagcagaacccccgaggtgacctgcgtggtggtggatgtgagccacgaggaccctgaggtgaagttcaactggtacgtggacggcgtggaggtgcacaatgccaagaccaagcccagggaggagcagtacaacagcacctaccgggtggtgtccgtgctgaccgtgctgcaccaggattggctgaacggcaaggagtacaagtgcaaggtgtccaacaaggccctgcctgcccctatcgagaaaaccatcagcaaggccaagggccagcccagagagccccaggtgtacaccctgccccctagcagagatgagctgaccaagaaccaggtgtccctgacctgcctggtgaagggcttctaccccagcgacatcgccgtggagtgggagagcaacggccagcccgagaacaactacaagaccaccccccctgtgctggacagcgatggcagcttcttcctgtacagcaagctgaccgtggacaagagcagatggcagcagggcaacgtgttcagctgcagcgtgatgcacgaggccctgcacaatcactacacccagaagagcctgagcctgtcccctggcaagtga

SEQ ID NO: 332 - DNA, 1026 bp, Artificial Sequence
  Synthetic
gacatccagatgacccagagccccagcagcctgagcgcctctgtgggcgatagagtgaccatcgactgcagagccagccaggccatcgacagctacctgcactggtatcagcagaagcctggcaaggcccctaagctgctgatctacagcgccagcaatctggagaccggcgtgcctagcagattcagcggcagcggctccggcaccgacttcaccctgaccatcagcagcctgctgcctgaggatttcgccacctactactgccagcaggtggtgtggagacctttcaccttcggccagggcaccaaggtggagatcaagcgggtggagcccaagagcagcgataagacccacacctgccccccctgccctgcccccgagctgctgggcggacccagcgtgttcctgttcccccccaagcctaaggacaccctgatgatcagcagaacccccgaggtgacctgcgtggtggtggatgtgagccacgaggaccctgaggtgaagttcaactggtacgtggacggcgtggaggtgcacaatgccaagaccaagcccagggaggagcagtacaacagcacctaccgggtggtgtccgtgctgaccgtgctgcaccaggattggctgaacggcaaggagtacaagtgcaaggtgtccaacaaggccctgcctgcccctatcgagaaaaccatcagcaaggccaagggccagcccagagagccccaggtgtacaccctgccccctagcagagatgagctgaccaagaaccaggtgtccctgacctgcctggtgaagggcttctaccccagcgacatcgccgtggagtgggagagcaacggccagcccgagaacaactacaagaccaccccccctgtgctggacagcgatggcagcttcttcctgtacagcaagctgaccgtggacaagagcagatggcagcagggcaacgtgttcagctgcagcgtgatgcacgaggccctgcacaatcactacacccagaagagcctgagcctgtcccctggcaagtga

SEQ ID NO: 333 - DNA, 1026 bp, Artificial Sequence
  Synthetic
gacatccagatgacccagagccccagcagcctgagcgcctctgtgggcgatagagtgaccatccagtgcagagccagccaggccatcgacagctacctgcactggtatcagcagaagcctggcaaggcccctaagctgctgatctacagcgccagcaatctggagaccggcgtgcctagcagattcagcggcagcggctccggcaccgacttcaccctgaccatcagcagcctgctgcctgaggatttcgccacctactactgccagcaggtggtgtggagacctttcaccttcggccagggcaccaaggtggagatcaagcgggtggagcccaagagcagcgataagacccacacctgccccccctgccctgcccccgagctgctgggcggacccagcgtgttcctgttcccccccaagcctaaggacaccctgatgatcagcagaacccccgaggtgacctgcgtggtggtggatgtgagccacgaggaccctgaggtgaagttcaactggtacgtggacggcgtggaggtgcacaatgccaagaccaagcccagggaggagcagtacaacagcacctaccgggtggtgtccgtgctgaccgtgctgcaccaggattggctgaacggcaaggagtacaagtgcaaggtgtccaacaaggccctgcctgcccctatcgagaaaaccatcagcaaggccaagggccagcccagagagccccaggtgtacaccctgccccctagcagagatgagctgaccaagaaccaggtgtccctgacctgcctggtgaagggcttctaccccagcgacatcgccgtggagtgggagagcaacggccagcccgagaacaactacaagaccaccccccctgtgctggacagcgatggcagcttcttcctgtacagcaagctgaccgtggacaagagcagatggcagcagggcaacgtgttcagctgcagcgtgatgcacgaggccctgcacaatcactacacccagaagagcctgagcctgtcccctggcaagtga

SEQ ID NO: 334 - DNA, 1026 bp, Artificial Sequence
  Synthetic
gacatccagatgacccagagccccagcagcctgagcgcctctgtgggcgatagagtgaccatccactgcagagccagccaggccatcgacagctacctgcactggtatcagcagaagcctggcaaggcccctaagctgctgatctacagcgccagcaatctggagaccggcgtgcctagcagattcagcggcagcggctccggcaccgacttcaccctgaccatcagcagcctgctgcctgaggatttcgccacctactactgccagcaggtggtgtggagacctttcaccttcggccagggcaccaaggtggagatcaagcgggtggagcccaagagcagcgataagacccacacctgccccccctgccctgcccccgagctgctgggcggacccagcgtgttcctgttcccccccaagcctaaggacaccctgatgatcagcagaacccccgaggtgacctgcgtggtggtggatgtgagccacgaggaccctgaggtgaagttcaactggtacgtggacggcgtggaggtgcacaatgccaagaccaagcccagggaggagcagtacaacagcacctaccgggtggtgtccgtgctgaccgtgctgcaccaggattggctgaacggcaaggagtacaagtgcaaggtgtccaacaaggccctgcctgcccctatcgagaaaaccatcagcaaggccaagggccagcccagagagccccaggtgtacaccctgccccctagcagagatgagctgaccaagaaccaggtgtccctgacctgcctggtgaagggcttctaccccagcgacatcgccgtggagtgggagagcaacggccagcccgagaacaactacaagaccaccccccctgtgctggacagcgatggcagcttcttcctgtacagcaagctgaccgtggacaagagcagatggcagcagggcaacgtgttcagctgcagcgtgatgcacgaggccctgcacaatcactacacccagaagagcctgagcctgtcccctggcaagtga

SEQ ID NO: 335 - DNA, 1026 bp, Artificial Sequence
  Synthetic
gacatccagatgacccagagccccagcagcctgagcgcctctgtgggcgatagagtgaccatcccctgcagagccagccaggccatcgacagctacctgcactggtatcagcagaagcctggcaaggcccctaagctgctgatctacagcgccagcaatctggagaccggcgtgcctagcagattcagcggcagcggctccggcaccgacttcaccctgaccatcagcagcctgctgcctgaggatttcgccacctactactgccagcaggtggtgtggagacctttcaccttcggccagggcaccaaggtggagatcaagcgggtggagcccaagagcagcgataagacccacacctgccccccctgccctgcccccgagctgctgggcggacccagcgtgttcctgttcccccccaagcctaaggacaccctgatgatcagcagaacccccgaggtgacctgcgtggtggtggatgtgagccacgaggaccctgaggtgaagttcaactggtacgtggacggcgtggaggtgcacaatgccaagaccaagcccagggaggagcagtacaacagcacctaccgggtggtgtccgtgctgaccgtgctgcaccaggattggctgaacggcaaggagtacaagtgcaaggtgtccaacaaggccctgcctgcccctatcgagaaaaccatcagcaaggccaagggccagcccagagagccccaggtgtacaccctgccccctagcagagatgagctgaccaagaaccaggtgtccctgacctgcctggtgaagggcttctaccccagcgacatcgccgtggagtgggagagcaacggccagcccgagaacaactacaagaccaccccccctgtgctggacagcgatggcagcttcttcctgtacagcaagctgaccgtggacaagagcagatggcagcagggcaacgtgttcagctgcagcgtgatgcacgaggccctgcacaatcactacacccagaagagcctgagcctgtcccctggcaagtga

SEQ ID NO: 336 - DNA, 1026 bp, Artificial Sequence
  Synthetic
gacatccagatgacccagagccccagcagcctgagcgcctctgtgggcgatagagtgaccatcaagtgcagagccagccaggccatcgacagctacctgcactggtatcagcagaagcctggcaaggcccctaagctgctgatctacagcgccagcaatctggagaccggcgtgcctagcagattcagcggcagcggctccggcaccgacttcaccctgaccatcagcagcctgctgcctgaggatttcgccacctactactgccagcaggtggtgtggagacctttcaccttcggccagggcaccaaggtggagatcaagcgggtggagcccaagagcagcgataagacccacacctgccccccctgccctgcccccgagctgctgggcggacccagcgtgttcctgttcccccccaagcctaaggacaccctgatgatcagcagaacccccgaggtgacctgcgtggtggtggatgtgagccacgaggaccctgaggtgaagttcaactggtacgtggacggcgtggaggtgcacaatgccaagaccaagcccagggaggagcagtacaacagcacctaccgggtggtgtccgtgctgaccgtgctgcaccaggattggctgaacggcaaggagtacaagtgcaaggtgtccaacaaggccctgcctgcccctatcgagaaaaccatcagcaaggccaagggccagcccagagagccccaggtgtacaccctgccccctagcagagatgagctgaccaagaaccaggtgtccctgacctgcctggtgaagggcttctaccccagcgacatcgccgtggagtgggagagcaacggccagcccgagaacaactacaagaccaccccccctgtgctggacagcgatggcagcttcttcctgtacagcaagctgaccgtggacaagagcagatggcagcagggcaacgtgttcagctgcagcgtgatgcacgaggccctgcacaatcactacacccagaagagcctgagcctgtcccctggcaagtga

SEQ ID NO: 337 - DNA, 1026 bp, Artificial Sequence
  Synthetic
gacatccagatgacccagagccccagcagcctgagcgcctctgtgggcgatagagtgaccatcacctgcagagccagccaggccatcgacagctacctgcactggagccagcagaagcctggcaaggcccctaagctgctgatctacagcgccagcaatctggagaccggcgtgcctagcagattcagcggcagcggctccggcaccgacttcaccctgaccatcagcagcctgctgcctgaggatttcgccacctactactgccagcaggtggtgtggagacctttcaccttcggccagggcaccaaggtggagatcaagcgggtggagcccaagagcagcgataagacccacacctgccccccctgccctgcccccgagctgctgggcggacccagcgtgttcctgttcccccccaagcctaaggacaccctgatgatcagcagaacccccgaggtgacctgcgtggtggtggatgtgagccacgaggaccctgaggtgaagttcaactggtacgtggacggcgtggaggtgcacaatgccaagaccaagcccagggaggagcagtacaacagcacctaccgggtggtgtccgtgctgaccgtgctgcaccaggattggctgaacggcaaggagtacaagtgcaaggtgtccaacaaggccctgcctgcccctatcgagaaaaccatcagcaaggccaagggccagcccagagagccccaggtgtacaccctgccccctagcagagatgagctgaccaagaaccaggtgtccctgacctgcctggtgaagggcttctaccccagcgacatcgccgtggagtgggagagcaacggccagcccgagaacaactacaagaccaccccccctgtgctggacagcgatggcagcttcttcctgtacagcaagctgaccgtggacaagagcagatggcagcagggcaacgtgttcagctgcagcgtgatgcacgaggccctgcacaatcactacacccagaagagcctgagcctgtcccctggcaagtga

SEQ ID NO: 338 - DNA, 1026 bp, Artificial Sequence
  Synthetic
gacatccagatgacccagagccccagcagcctgagcgcctctgtgggcgatagagtgaccatcacctgcagagccagccaggccatcgacagctacctgcactgggaccagcagaagcctggcaaggcccctaagctgctgatctacagcgccagcaatctggagaccggcgtgcctagcagattcagcggcagcggctccggcaccgacttcaccctgaccatcagcagcctgctgcctgaggatttcgccacctactactgccagcaggtggtgtggagacctttcaccttcggccagggcaccaaggtggagatcaagcgggtggagcccaagagcagcgataagacccacacctgccccccctgccctgcccccgagctgctgggcggacccagcgtgttcctgttcccccccaagcctaaggacaccctgatgatcagcagaacccccgaggtgacctgcgtggtggtggatgtgagccacgaggaccctgaggtgaagttcaactggtacgtggacggcgtggaggtgcacaatgccaagaccaagcccagggaggagcagtacaacagcacctaccgggtggtgtccgtgctgaccgtgctgcaccaggattggctgaacggcaaggagtacaagtgcaaggtgtccaacaaggccctgcctgcccctatcgagaaaaccatcagcaaggccaagggccagcccagagagccccaggtgtacaccctgccccctagcagagatgagctgaccaagaaccaggtgtccctgacctgcctggtgaagggcttctaccccagcgacatcgccgtggagtgggagagcaacggccagcccgagaacaactacaagaccaccccccctgtgctggacagcgatggcagcttcttcctgtacagcaagctgaccgtggacaagagcagatggcagcagggcaacgtgttcagctgcagcgtgatgcacgaggccctgcacaatcactacacccagaagagcctgagcctgtcccctggcaagtga

SEQ ID NO: 339 - DNA, 1026 bp, Artificial Sequence
  Synthetic
gacatccagatgacccagagccccagcagcctgagcgcctctgtgggcgatagagtgaccatcacctgcagagccagccaggccatcgacagctacctgcactggcagcagcagaagcctggcaaggcccctaagctgctgatctacagcgccagcaatctggagaccggcgtgcctagcagattcagcggcagcggctccggcaccgacttcaccctgaccatcagcagcctgctgcctgaggatttcgccacctactactgccagcaggtggtgtggagacctttcaccttcggccagggcaccaaggtggagatcaagcgggtggagcccaagagcagcgataagacccacacctgccccccctgccctgcccccgagctgctgggcggacccagcgtgttcctgttcccccccaagcctaaggacaccctgatgatcagcagaacccccgaggtgacctgcgtggtggtggatgtgagccacgaggaccctgaggtgaagttcaactggtacgtggacggcgtggaggtgcacaatgccaagaccaagcccagggaggagcagtacaacagcacctaccgggtggtgtccgtgctgaccgtgctgcaccaggattggctgaacggcaaggagtacaagtgcaaggtgtccaacaaggccctgcctgcccctatcgagaaaaccatcagcaaggccaagggccagcccagagagccccaggtgtacaccctgccccctagcagagatgagctgaccaagaaccaggtgtccctgacctgcctggtgaagggcttctaccccagcgacatcgccgtggagtgggagagcaacggccagcccgagaacaactacaagaccaccccccctgtgctggacagcgatggcagcttcttcctgtacagcaagctgaccgtggacaagagcagatggcagcagggcaacgtgttcagctgcagcgtgatgcacgaggccctgcacaatcactacacccagaagagcctgagcctgtcccctggcaagtga

SEQ ID NO: 340 - DNA, 1026 bp, Artificial Sequence
  Synthetic
gacatccagatgacccagagccccagcagcctgagcgcctctgtgggcgatagagtgaccatcacctgcagagccagccaggccatcgacagctacctgcactggcaccagcagaagcctggcaaggcccctaagctgctgatctacagcgccagcaatctggagaccggcgtgcctagcagattcagcggcagcggctccggcaccgacttcaccctgaccatcagcagcctgctgcctgaggatttcgccacctactactgccagcaggtggtgtggagacctttcaccttcggccagggcaccaaggtggagatcaagcgggtggagcccaagagcagcgataagacccacacctgccccccctgccctgcccccgagctgctgggcggacccagcgtgttcctgttcccccccaagcctaaggacaccctgatgatcagcagaacccccgaggtgacctgcgtggtggtggatgtgagccacgaggaccctgaggtgaagttcaactggtacgtggacggcgtggaggtgcacaatgccaagaccaagcccagggaggagcagtacaacagcacctaccgggtggtgtccgtgctgaccgtgctgcaccaggattggctgaacggcaaggagtacaagtgcaaggtgtccaacaaggccctgcctgcccctatcgagaaaaccatcagcaaggccaagggccagcccagagagccccaggtgtacaccctgccccctagcagagatgagctgaccaagaaccaggtgtccctgacctgcctggtgaagggcttctaccccagcgacatcgccgtggagtgggagagcaacggccagcccgagaacaactacaagaccaccccccctgtgctggacagcgatggcagcttcttcctgtacagcaagctgaccgtggacaagagcagatggcagcagggcaacgtgttcagctgcagcgtgatgcacgaggccctgcacaatcactacacccagaagagcctgagcctgtcccctggcaagtga

SEQ ID NO: 341 - DNA, 1026 bp, Artificial Sequence
  Synthetic
gacatccagatgacccagagccccagcagcctgagcgcctctgtgggcgatagagtgaccatcacctgcagagccagccaggccatcgacagctacctgcactggccccagcagaagcctggcaaggcccctaagctgctgatctacagcgccagcaatctggagaccggcgtgcctagcagattcagcggcagcggctccggcaccgacttcaccctgaccatcagcagcctgctgcctgaggatttcgccacctactactgccagcaggtggtgtggagacctttcaccttcggccagggcaccaaggtggagatcaagcgggtggagcccaagagcagcgataagacccacacctgccccccctgccctgcccccgagctgctgggcggacccagcgtgttcctgttcccccccaagcctaaggacaccctgatgatcagcagaacccccgaggtgacctgcgtggtggtggatgtgagccacgaggaccctgaggtgaagttcaactggtacgtggacggcgtggaggtgcacaatgccaagaccaagcccagggaggagcagtacaacagcacctaccgggtggtgtccgtgctgaccgtgctgcaccaggattggctgaacggcaaggagtacaagtgcaaggtgtccaacaaggccctgcctgcccctatcgagaaaaccatcagcaaggccaagggccagcccagagagccccaggtgtacaccctgccccctagcagagatgagctgaccaagaaccaggtgtccctgacctgcctggtgaagggcttctaccccagcgacatcgccgtggagtgggagagcaacggccagcccgagaacaactacaagaccaccccccctgtgctggacagcgatggcagcttcttcctgtacagcaagctgaccgtggacaagagcagatggcagcagggcaacgtgttcagctgcagcgtgatgcacgaggccctgcacaatcactacacccagaagagcctgagcctgtcccctggcaagtga

SEQ ID NO: 342 - DNA, 1026 bp, Artificial Sequence
  Synthetic
gacatccagatgacccagagccccagcagcctgagcgcctctgtgggcgatagagtgaccatcacctgcagagccagccaggccatcgacagctacctgcactggaagcagcagaagcctggcaaggcccctaagctgctgatctacagcgccagcaatctggagaccggcgtgcctagcagattcagcggcagcggctccggcaccgacttcaccctgaccatcagcagcctgctgcctgaggatttcgccacctactactgccagcaggtggtgtggagacctttcaccttcggccagggcaccaaggtggagatcaagcgggtggagcccaagagcagcgataagacccacacctgccccccctgccctgcccccgagctgctgggcggacccagcgtgttcctgttcccccccaagcctaaggacaccctgatgatcagcagaacccccgaggtgacctgcgtggtggtggatgtgagccacgaggaccctgaggtgaagttcaactggtacgtggacggcgtggaggtgcacaatgccaagaccaagcccagggaggagcagtacaacagcacctaccgggtggtgtccgtgctgaccgtgctgcaccaggattggctgaacggcaaggagtacaagtgcaaggtgtccaacaaggccctgcctgcccctatcgagaaaaccatcagcaaggccaagggccagcccagagagccccaggtgtacaccctgccccctagcagagatgagctgaccaagaaccaggtgtccctgacctgcctggtgaagggcttctaccccagcgacatcgccgtggagtgggagagcaacggccagcccgagaacaactacaagaccaccccccctgtgctggacagcgatggcagcttcttcctgtacagcaagctgaccgtggacaagagcagatggcagcagggcaacgtgttcagctgcagcgtgatgcacgaggccctgcacaatcactacacccagaagagcctgagcctgtcccctggcaagtga

SEQ ID NO: 343 - DNA, 1026 bp, Artificial Sequence
  Synthetic
gacatccagatgacccagagccccagcagcctgagcgcctctgtgggcgatagagtgaccatcacctgcagagccagccaggccatcgacagctacctgcactggtatagccagaagcctggcaaggcccctaagctgctgatctacagcgccagcaatctggagaccggcgtgcctagcagattcagcggcagcggctccggcaccgacttcaccctgaccatcagcagcctgctgcctgaggatttcgccacctactactgccagcaggtggtgtggagacctttcaccttcggccagggcaccaaggtggagatcaagcgggtggagcccaagagcagcgataagacccacacctgccccccctgccctgcccccgagctgctgggcggacccagcgtgttcctgttcccccccaagcctaaggacaccctgatgatcagcagaacccccgaggtgacctgcgtggtggtggatgtgagccacgaggaccctgaggtgaagttcaactggtacgtggacggcgtggaggtgcacaatgccaagaccaagcccagggaggagcagtacaacagcacctaccgggtggtgtccgtgctgaccgtgctgcaccaggattggctgaacggcaaggagtacaagtgcaaggtgtccaacaaggccctgcctgcccctatcgagaaaaccatcagcaaggccaagggccagcccagagagccccaggtgtacaccctgccccctagcagagatgagctgaccaagaaccaggtgtccctgacctgcctggtgaagggcttctaccccagcgacatcgccgtggagtgggagagcaacggccagcccgagaacaactacaagaccaccccccctgtgctggacagcgatggcagcttcttcctgtacagcaagctgaccgtggacaagagcagatggcagcagggcaacgtgttcagctgcagcgtgatgcacgaggccctgcacaatcactacacccagaagagcctgagcctgtcccctggcaagtga

SEQ ID NO: 344 - DNA, 1026 bp, Artificial Sequence
  Synthetic
gacatccagatgacccagagccccagcagcctgagcgcctctgtgggcgatagagtgaccatcacctgcagagccagccaggccatcgacagctacctgcactggtattaccagaagcctggcaaggcccctaagctgctgatctacagcgccagcaatctggagaccggcgtgcctagcagattcagcggcagcggctccggcaccgacttcaccctgaccatcagcagcctgctgcctgaggatttcgccacctactactgccagcaggtggtgtggagacctttcaccttcggccagggcaccaaggtggagatcaagcgggtggagcccaagagcagcgataagacccacacctgccccccctgccctgcccccgagctgctgggcggacccagcgtgttcctgttcccccccaagcctaaggacaccctgatgatcagcagaacccccgaggtgacctgcgtggtggtggatgtgagccacgaggaccctgaggtgaagttcaactggtacgtggacggcgtggaggtgcacaatgccaagaccaagcccagggaggagcagtacaacagcacctaccgggtggtgtccgtgctgaccgtgctgcaccaggattggctgaacggcaaggagtacaagtgcaaggtgtccaacaaggccctgcctgcccctatcgagaaaaccatcagcaaggccaagggccagcccagagagccccaggtgtacaccctgccccctagcagagatgagctgaccaagaaccaggtgtccctgacctgcctggtgaagggcttctaccccagcgacatcgccgtggagtgggagagcaacggccagcccgagaacaactacaagaccaccccccctgtgctggacagcgatggcagcttcttcctgtacagcaagctgaccgtggacaagagcagatggcagcagggcaacgtgttcagctgcagcgtgatgcacgaggccctgcacaatcactacacccagaagagcctgagcctgtcccctggcaagtga

SEQ ID NO: 345 - DNA, 1026 bp, Artificial Sequence
  Synthetic
gacatccagatgacccagagccccagcagcctgagcgcctctgtgggcgatagagtgaccatcacctgcagagccagccaggccatcgacagctacctgcactggtatgaccagaagcctggcaaggcccctaagctgctgatctacagcgccagcaatctggagaccggcgtgcctagcagattcagcggcagcggctccggcaccgacttcaccctgaccatcagcagcctgctgcctgaggatttcgccacctactactgccagcaggtggtgtggagacctttcaccttcggccagggcaccaaggtggagatcaagcgggtggagcccaagagcagcgataagacccacacctgccccccctgccctgcccccgagctgctgggcggacccagcgtgttcctgttcccccccaagcctaaggacaccctgatgatcagcagaacccccgaggtgacctgcgtggtggtggatgtgagccacgaggaccctgaggtgaagttcaactggtacgtggacggcgtggaggtgcacaatgccaagaccaagcccagggaggagcagtacaacagcacctaccgggtggtgtccgtgctgaccgtgctgcaccaggattggctgaacggcaaggagtacaagtgcaaggtgtccaacaaggccctgcctgcccctatcgagaaaaccatcagcaaggccaagggccagcccagagagccccaggtgtacaccctgccccctagcagagatgagctgaccaagaaccaggtgtccctgacctgcctggtgaagggcttctaccccagcgacatcgccgtggagtgggagagcaacggccagcccgagaacaactacaagaccaccccccctgtgctggacagcgatggcagcttcttcctgtacagcaagctgaccgtggacaagagcagatggcagcagggcaacgtgttcagctgcagcgtgatgcacgaggccctgcacaatcactacacccagaagagcctgagcctgtcccctggcaagtga

SEQ ID NO: 346 - DNA, 1026 bp, Artificial Sequence
  Synthetic
gacatccagatgacccagagccccagcagcctgagcgcctctgtgggcgatagagtgaccatcacctgcagagccagccaggccatcgacagctacctgcactggtatcaccagaagcctggcaaggcccctaagctgctgatctacagcgccagcaatctggagaccggcgtgcctagcagattcagcggcagcggctccggcaccgacttcaccctgaccatcagcagcctgctgcctgaggatttcgccacctactactgccagcaggtggtgtggagacctttcaccttcggccagggcaccaaggtggagatcaagcgggtggagcccaagagcagcgataagacccacacctgccccccctgccctgcccccgagctgctgggcggacccagcgtgttcctgttcccccccaagcctaaggacaccctgatgatcagcagaacccccgaggtgacctgcgtggtggtggatgtgagccacgaggaccctgaggtgaagttcaactggtacgtggacggcgtggaggtgcacaatgccaagaccaagcccagggaggagcagtacaacagcacctaccgggtggtgtccgtgctgaccgtgctgcaccaggattggctgaacggcaaggagtacaagtgcaaggtgtccaacaaggccctgcctgcccctatcgagaaaaccatcagcaaggccaagggccagcccagagagccccaggtgtacaccctgccccctagcagagatgagctgaccaagaaccaggtgtccctgacctgcctggtgaagggcttctaccccagcgacatcgccgtggagtgggagagcaacggccagcccgagaacaactacaagaccaccccccctgtgctggacagcgatggcagcttcttcctgtacagcaagctgaccgtggacaagagcagatggcagcagggcaacgtgttcagctgcagcgtgatgcacgaggccctgcacaatcactacacccagaagagcctgagcctgtcccctggcaagtga

SEQ ID NO: 347 - DNA, 1026 bp, Artificial Sequence
  Synthetic
gacatccagatgacccagagccccagcagcctgagcgcctctgtgggcgatagagtgaccatcacctgcagagccagccaggccatcgacagctacctgcactggtatccccagaagcctggcaaggcccctaagctgctgatctacagcgccagcaatctggagaccggcgtgcctagcagattcagcggcagcggctccggcaccgacttcaccctgaccatcagcagcctgctgcctgaggatttcgccacctactactgccagcaggtggtgtggagacctttcaccttcggccagggcaccaaggtggagatcaagcgggtggagcccaagagcagcgataagacccacacctgccccccctgccctgcccccgagctgctgggcggacccagcgtgttcctgttcccccccaagcctaaggacaccctgatgatcagcagaacccccgaggtgacctgcgtggtggtggatgtgagccacgaggaccctgaggtgaagttcaactggtacgtggacggcgtggaggtgcacaatgccaagaccaagcccagggaggagcagtacaacagcacctaccgggtggtgtccgtgctgaccgtgctgcaccaggattggctgaacggcaaggagtacaagtgcaaggtgtccaacaaggccctgcctgcccctatcgagaaaaccatcagcaaggccaagggccagcccagagagccccaggtgtacaccctgccccctagcagagatgagctgaccaagaaccaggtgtccctgacctgcctggtgaagggcttctaccccagcgacatcgccgtggagtgggagagcaacggccagcccgagaacaactacaagaccaccccccctgtgctggacagcgatggcagcttcttcctgtacagcaagctgaccgtggacaagagcagatggcagcagggcaacgtgttcagctgcagcgtgatgcacgaggccctgcacaatcactacacccagaagagcctgagcctgtcccctggcaagtga

SEQ ID NO: 348 - DNA, 1026 bp, Artificial Sequence
  Synthetic
gacatccagatgacccagagccccagcagcctgagcgcctctgtgggcgatagagtgaccatcacctgcagagccagccaggccatcgacagctacctgcactggtataagcagaagcctggcaaggcccctaagctgctgatctacagcgccagcaatctggagaccggcgtgcctagcagattcagcggcagcggctccggcaccgacttcaccctgaccatcagcagcctgctgcctgaggatttcgccacctactactgccagcaggtggtgtggagacctttcaccttcggccagggcaccaaggtggagatcaagcgggtggagcccaagagcagcgataagacccacacctgccccccctgccctgcccccgagctgctgggcggacccagcgtgttcctgttcccccccaagcctaaggacaccctgatgatcagcagaacccccgaggtgacctgcgtggtggtggatgtgagccacgaggaccctgaggtgaagttcaactggtacgtggacggcgtggaggtgcacaatgccaagaccaagcccagggaggagcagtacaacagcacctaccgggtggtgtccgtgctgaccgtgctgcaccaggattggctgaacggcaaggagtacaagtgcaaggtgtccaacaaggccctgcctgcccctatcgagaaaaccatcagcaaggccaagggccagcccagagagccccaggtgtacaccctgccccctagcagagatgagctgaccaagaaccaggtgtccctgacctgcctggtgaagggcttctaccccagcgacatcgccgtggagtgggagagcaacggccagcccgagaacaactacaagaccaccccccctgtgctggacagcgatggcagcttcttcctgtacagcaagctgaccgtggacaagagcagatggcagcagggcaacgtgttcagctgcagcgtgatgcacgaggccctgcacaatcactacacccagaagagcctgagcctgtcccctggcaagtga

SEQ ID NO: 349 - DNA, 1026 bp, Artificial Sequence
  Synthetic
gacatccagatgacccagagccccagcagcctgagcgcctctgtgggcgatagagtgaccatcacctgcagagccagccaggccatcgacagctacctgcactggtatcagagcaagcctggcaaggcccctaagctgctgatctacagcgccagcaatctggagaccggcgtgcctagcagattcagcggcagcggctccggcaccgacttcaccctgaccatcagcagcctgctgcctgaggatttcgccacctactactgccagcaggtggtgtggagacctttcaccttcggccagggcaccaaggtggagatcaagcgggtggagcccaagagcagcgataagacccacacctgccccccctgccctgcccccgagctgctgggcggacccagcgtgttcctgttcccccccaagcctaaggacaccctgatgatcagcagaacccccgaggtgacctgcgtggtggtggatgtgagccacgaggaccctgaggtgaagttcaactggtacgtggacggcgtggaggtgcacaatgccaagaccaagcccagggaggagcagtacaacagcacctaccgggtggtgtccgtgctgaccgtgctgcaccaggattggctgaacggcaaggagtacaagtgcaaggtgtccaacaaggccctgcctgcccctatcgagaaaaccatcagcaaggccaagggccagcccagagagccccaggtgtacaccctgccccctagcagagatgagctgaccaagaaccaggtgtccctgacctgcctggtgaagggcttctaccccagcgacatcgccgtggagtgggagagcaacggccagcccgagaacaactacaagaccaccccccctgtgctggacagcgatggcagcttcttcctgtacagcaagctgaccgtggacaagagcagatggcagcagggcaacgtgttcagctgcagcgtgatgcacgaggccctgcacaatcactacacccagaagagcctgagcctgtcccctggcaagtga

SEQ ID NO: 350 - DNA, 1026 bp, Artificial Sequence
  Synthetic
gacatccagatgacccagagccccagcagcctgagcgcctctgtgggcgatagagtgaccatcacctgcagagccagccaggccatcgacagctacctgcactggtatcagctgaagcctggcaaggcccctaagctgctgatctacagcgccagcaatctggagaccggcgtgcctagcagattcagcggcagcggctccggcaccgacttcaccctgaccatcagcagcctgctgcctgaggatttcgccacctactactgccagcaggtggtgtggagacctttcaccttcggccagggcaccaaggtggagatcaagcgggtggagcccaagagcagcgataagacccacacctgccccccctgccctgcccccgagctgctgggcggacccagcgtgttcctgttcccccccaagcctaaggacaccctgatgatcagcagaacccccgaggtgacctgcgtggtggtggatgtgagccacgaggaccctgaggtgaagttcaactggtacgtggacggcgtggaggtgcacaatgccaagaccaagcccagggaggagcagtacaacagcacctaccgggtggtgtccgtgctgaccgtgctgcaccaggattggctgaacggcaaggagtacaagtgcaaggtgtccaacaaggccctgcctgcccctatcgagaaaaccatcagcaaggccaagggccagcccagagagccccaggtgtacaccctgccccctagcagagatgagctgaccaagaaccaggtgtccctgacctgcctggtgaagggcttctaccccagcgacatcgccgtggagtgggagagcaacggccagcccgagaacaactacaagaccaccccccctgtgctggacagcgatggcagcttcttcctgtacagcaagctgaccgtggacaagagcagatggcagcagggcaacgtgttcagctgcagcgtgatgcacgaggccctgcacaatcactacacccagaagagcctgagcctgtcccctggcaagtga

SEQ ID NO: 351 - DNA, 1026 bp, Artificial Sequence
  Synthetic
gacatccagatgacccagagccccagcagcctgagcgcctctgtgggcgatagagtgaccatcacctgcagagccagccaggccatcgacagctacctgcactggtatcagtacaagcctggcaaggcccctaagctgctgatctacagcgccagcaatctggagaccggcgtgcctagcagattcagcggcagcggctccggcaccgacttcaccctgaccatcagcagcctgctgcctgaggatttcgccacctactactgccagcaggtggtgtggagacctttcaccttcggccagggcaccaaggtggagatcaagcgggtggagcccaagagcagcgataagacccacacctgccccccctgccctgcccccgagctgctgggcggacccagcgtgttcctgttcccccccaagcctaaggacaccctgatgatcagcagaacccccgaggtgacctgcgtggtggtggatgtgagccacgaggaccctgaggtgaagttcaactggtacgtggacggcgtggaggtgcacaatgccaagaccaagcccagggaggagcagtacaacagcacctaccgggtggtgtccgtgctgaccgtgctgcaccaggattggctgaacggcaaggagtacaagtgcaaggtgtccaacaaggccctgcctgcccctatcgagaaaaccatcagcaaggccaagggccagcccagagagccccaggtgtacaccctgccccctagcagagatgagctgaccaagaaccaggtgtccctgacctgcctggtgaagggcttctaccccagcgacatcgccgtggagtgggagagcaacggccagcccgagaacaactacaagaccaccccccctgtgctggacagcgatggcagcttcttcctgtacagcaagctgaccgtggacaagagcagatggcagcagggcaacgtgttcagctgcagcgtgatgcacgaggccctgcacaatcactacacccagaagagcctgagcctgtcccctggcaagtga

SEQ ID NO: 352 - DNA, 1026 bp, Artificial Sequence
  Synthetic
gacatccagatgacccagagccccagcagcctgagcgcctctgtgggcgatagagtgaccatcacctgcagagccagccaggccatcgacagctacctgcactggtatcaggacaagcctggcaaggcccctaagctgctgatctacagcgccagcaatctggagaccggcgtgcctagcagattcagcggcagcggctccggcaccgacttcaccctgaccatcagcagcctgctgcctgaggatttcgccacctactactgccagcaggtggtgtggagacctttcaccttcggccagggcaccaaggtggagatcaagcgggtggagcccaagagcagcgataagacccacacctgccccccctgccctgcccccgagctgctgggcggacccagcgtgttcctgttcccccccaagcctaaggacaccctgatgatcagcagaacccccgaggtgacctgcgtggtggtggatgtgagccacgaggaccctgaggtgaagttcaactggtacgtggacggcgtggaggtgcacaatgccaagaccaagcccagggaggagcagtacaacagcacctaccgggtggtgtccgtgctgaccgtgctgcaccaggattggctgaacggcaaggagtacaagtgcaaggtgtccaacaaggccctgcctgcccctatcgagaaaaccatcagcaaggccaagggccagcccagagagccccaggtgtacaccctgccccctagcagagatgagctgaccaagaaccaggtgtccctgacctgcctggtgaagggcttctaccccagcgacatcgccgtggagtgggagagcaacggccagcccgagaacaactacaagaccaccccccctgtgctggacagcgatggcagcttcttcctgtacagcaagctgaccgtggacaagagcagatggcagcagggcaacgtgttcagctgcagcgtgatgcacgaggccctgcacaatcactacacccagaagagcctgagcctgtcccctggcaagtga

SEQ ID NO: 353 - DNA, 1026 bp, Artificial Sequence
  Synthetic
gacatccagatgacccagagccccagcagcctgagcgcctctgtgggcgatagagtgaccatcacctgcagagccagccaggccatcgacagctacctgcactggtatcagcacaagcctggcaaggcccctaagctgctgatctacagcgccagcaatctggagaccggcgtgcctagcagattcagcggcagcggctccggcaccgacttcaccctgaccatcagcagcctgctgcctgaggatttcgccacctactactgccagcaggtggtgtggagacctttcaccttcggccagggcaccaaggtggagatcaagcgggtggagcccaagagcagcgataagacccacacctgccccccctgccctgcccccgagctgctgggcggacccagcgtgttcctgttcccccccaagcctaaggacaccctgatgatcagcagaacccccgaggtgacctgcgtggtggtggatgtgagccacgaggaccctgaggtgaagttcaactggtacgtggacggcgtggaggtgcacaatgccaagaccaagcccagggaggagcagtacaacagcacctaccgggtggtgtccgtgctgaccgtgctgcaccaggattggctgaacggcaaggagtacaagtgcaaggtgtccaacaaggccctgcctgcccctatcgagaaaaccatcagcaaggccaagggccagcccagagagccccaggtgtacaccctgccccctagcagagatgagctgaccaagaaccaggtgtccctgacctgcctggtgaagggcttctaccccagcgacatcgccgtggagtgggagagcaacggccagcccgagaacaactacaagaccaccccccctgtgctggacagcgatggcagcttcttcctgtacagcaagctgaccgtggacaagagcagatggcagcagggcaacgtgttcagctgcagcgtgatgcacgaggccctgcacaatcactacacccagaagagcctgagcctgtcccctggcaagtga

SEQ ID NO: 354 - DNA, 1026 bp, Artificial Sequence
  Synthetic
gacatccagatgacccagagccccagcagcctgagcgcctctgtgggcgatagagtgaccatcacctgcagagccagccaggccatcgacagctacctgcactggtatcagcccaagcctggcaaggcccctaagctgctgatctacagcgccagcaatctggagaccggcgtgcctagcagattcagcggcagcggctccggcaccgacttcaccctgaccatcagcagcctgctgcctgaggatttcgccacctactactgccagcaggtggtgtggagacctttcaccttcggccagggcaccaaggtggagatcaagcgggtggagcccaagagcagcgataagacccacacctgccccccctgccctgcccccgagctgctgggcggacccagcgtgttcctgttcccccccaagcctaaggacaccctgatgatcagcagaacccccgaggtgacctgcgtggtggtggatgtgagccacgaggaccctgaggtgaagttcaactggtacgtggacggcgtggaggtgcacaatgccaagaccaagcccagggaggagcagtacaacagcacctaccgggtggtgtccgtgctgaccgtgctgcaccaggattggctgaacggcaaggagtacaagtgcaaggtgtccaacaaggccctgcctgcccctatcgagaaaaccatcagcaaggccaagggccagcccagagagccccaggtgtacaccctgccccctagcagagatgagctgaccaagaaccaggtgtccctgacctgcctggtgaagggcttctaccccagcgacatcgccgtggagtgggagagcaacggccagcccgagaacaactacaagaccaccccccctgtgctggacagcgatggcagcttcttcctgtacagcaagctgaccgtggacaagagcagatggcagcagggcaacgtgttcagctgcagcgtgatgcacgaggccctgcacaatcactacacccagaagagcctgagcctgtcccctggcaagtga

SEQ ID NO: 355 - DNA, 1026 bp, Artificial Sequence
  Synthetic
gacatccagatgacccagagccccagcagcctgagcgcctctgtgggcgatagagtgaccatcacctgcagagccagccaggccatcgacagctacctgcactggtatcagaagaagcctggcaaggcccctaagctgctgatctacagcgccagcaatctggagaccggcgtgcctagcagattcagcggcagcggctccggcaccgacttcaccctgaccatcagcagcctgctgcctgaggatttcgccacctactactgccagcaggtggtgtggagacctttcaccttcggccagggcaccaaggtggagatcaagcgggtggagcccaagagcagcgataagacccacacctgccccccctgccctgcccccgagctgctgggcggacccagcgtgttcctgttcccccccaagcctaaggacaccctgatgatcagcagaacccccgaggtgacctgcgtggtggtggatgtgagccacgaggaccctgaggtgaagttcaactggtacgtggacggcgtggaggtgcacaatgccaagaccaagcccagggaggagcagtacaacagcacctaccgggtggtgtccgtgctgaccgtgctgcaccaggattggctgaacggcaaggagtacaagtgcaaggtgtccaacaaggccctgcctgcccctatcgagaaaaccatcagcaaggccaagggccagcccagagagccccaggtgtacaccctgccccctagcagagatgagctgaccaagaaccaggtgtccctgacctgcctggtgaagggcttctaccccagcgacatcgccgtggagtgggagagcaacggccagcccgagaacaactacaagaccaccccccctgtgctggacagcgatggcagcttcttcctgtacagcaagctgaccgtggacaagagcagatggcagcagggcaacgtgttcagctgcagcgtgatgcacgaggccctgcacaatcactacacccagaagagcctgagcctgtcccctggcaagtga

SEQ ID NO: 356 - DNA, 1026 bp, Artificial Sequence
  Synthetic
gacatccagatgacccagagccccagcagcctgagcgcctctgtgggcgatagagtgaccatcacctgcagagccagccaggccatcgacagctacctgcactggtatcagcagagccctggcaaggcccctaagctgctgatctacagcgccagcaatctggagaccggcgtgcctagcagattcagcggcagcggctccggcaccgacttcaccctgaccatcagcagcctgctgcctgaggatttcgccacctactactgccagcaggtggtgtggagacctttcaccttcggccagggcaccaaggtggagatcaagcgggtggagcccaagagcagcgataagacccacacctgccccccctgccctgcccccgagctgctgggcggacccagcgtgttcctgttcccccccaagcctaaggacaccctgatgatcagcagaacccccgaggtgacctgcgtggtggtggatgtgagccacgaggaccctgaggtgaagttcaactggtacgtggacggcgtggaggtgcacaatgccaagaccaagcccagggaggagcagtacaacagcacctaccgggtggtgtccgtgctgaccgtgctgcaccaggattggctgaacggcaaggagtacaagtgcaaggtgtccaacaaggccctgcctgcccctatcgagaaaaccatcagcaaggccaagggccagcccagagagccccaggtgtacaccctgccccctagcagagatgagctgaccaagaaccaggtgtccctgacctgcctggtgaagggcttctaccccagcgacatcgccgtggagtgggagagcaacggccagcccgagaacaactacaagaccaccccccctgtgctggacagcgatggcagcttcttcctgtacagcaagctgaccgtggacaagagcagatggcagcagggcaacgtgttcagctgcagcgtgatgcacgaggccctgcacaatcactacacccagaagagcctgagcctgtcccctggcaagtga

SEQ ID NO: 357 - DNA, 1026 bp, Artificial Sequence
  Synthetic
gacatccagatgacccagagccccagcagcctgagcgcctctgtgggcgatagagtgaccatcacctgcagagccagccaggccatcgacagctacctgcactggtatcagcagctgcctggcaaggcccctaagctgctgatctacagcgccagcaatctggagaccggcgtgcctagcagattcagcggcagcggctccggcaccgacttcaccctgaccatcagcagcctgctgcctgaggatttcgccacctactactgccagcaggtggtgtggagacctttcaccttcggccagggcaccaaggtggagatcaagcgggtggagcccaagagcagcgataagacccacacctgccccccctgccctgcccccgagctgctgggcggacccagcgtgttcctgttcccccccaagcctaaggacaccctgatgatcagcagaacccccgaggtgacctgcgtggtggtggatgtgagccacgaggaccctgaggtgaagttcaactggtacgtggacggcgtggaggtgcacaatgccaagaccaagcccagggaggagcagtacaacagcacctaccgggtggtgtccgtgctgaccgtgctgcaccaggattggctgaacggcaaggagtacaagtgcaaggtgtccaacaaggccctgcctgcccctatcgagaaaaccatcagcaaggccaagggccagcccagagagccccaggtgtacaccctgccccctagcagagatgagctgaccaagaaccaggtgtccctgacctgcctggtgaagggcttctaccccagcgacatcgccgtggagtgggagagcaacggccagcccgagaacaactacaagaccaccccccctgtgctggacagcgatggcagcttcttcctgtacagcaagctgaccgtggacaagagcagatggcagcagggcaacgtgttcagctgcagcgtgatgcacgaggccctgcacaatcactacacccagaagagcctgagcctgtcccctggcaagtga

SEQ ID NO: 358 - DNA, 1026 bp, Artificial Sequence
  Synthetic
gacatccagatgacccagagccccagcagcctgagcgcctctgtgggcgatagagtgaccatcacctgcagagccagccaggccatcgacagctacctgcactggtatcagcagtaccctggcaaggcccctaagctgctgatctacagcgccagcaatctggagaccggcgtgcctagcagattcagcggcagcggctccggcaccgacttcaccctgaccatcagcagcctgctgcctgaggatttcgccacctactactgccagcaggtggtgtggagacctttcaccttcggccagggcaccaaggtggagatcaagcgggtggagcccaagagcagcgataagacccacacctgccccccctgccctgcccccgagctgctgggcggacccagcgtgttcctgttcccccccaagcctaaggacaccctgatgatcagcagaacccccgaggtgacctgcgtggtggtggatgtgagccacgaggaccctgaggtgaagttcaactggtacgtggacggcgtggaggtgcacaatgccaagaccaagcccagggaggagcagtacaacagcacctaccgggtggtgtccgtgctgaccgtgctgcaccaggattggctgaacggcaaggagtacaagtgcaaggtgtccaacaaggccctgcctgcccctatcgagaaaaccatcagcaaggccaagggccagcccagagagccccaggtgtacaccctgccccctagcagagatgagctgaccaagaaccaggtgtccctgacctgcctggtgaagggcttctaccccagcgacatcgccgtggagtgggagagcaacggccagcccgagaacaactacaagaccaccccccctgtgctggacagcgatggcagcttcttcctgtacagcaagctgaccgtggacaagagcagatggcagcagggcaacgtgttcagctgcagcgtgatgcacgaggccctgcacaatcactacacccagaagagcctgagcctgtcccctggcaagtga

SEQ ID NO: 359 - DNA, 1026 bp, Artificial Sequence
  Synthetic
gacatccagatgacccagagccccagcagcctgagcgcctctgtgggcgatagagtgaccatcacctgcagagccagccaggccatcgacagctacctgcactggtatcagcaggaccctggcaaggcccctaagctgctgatctacagcgccagcaatctggagaccggcgtgcctagcagattcagcggcagcggctccggcaccgacttcaccctgaccatcagcagcctgctgcctgaggatttcgccacctactactgccagcaggtggtgtggagacctttcaccttcggccagggcaccaaggtggagatcaagcgggtggagcccaagagcagcgataagacccacacctgccccccctgccctgcccccgagctgctgggcggacccagcgtgttcctgttcccccccaagcctaaggacaccctgatgatcagcagaacccccgaggtgacctgcgtggtggtggatgtgagccacgaggaccctgaggtgaagttcaactggtacgtggacggcgtggaggtgcacaatgccaagaccaagcccagggaggagcagtacaacagcacctaccgggtggtgtccgtgctgaccgtgctgcaccaggattggctgaacggcaaggagtacaagtgcaaggtgtccaacaaggccctgcctgcccctatcgagaaaaccatcagcaaggccaagggccagcccagagagccccaggtgtacaccctgccccctagcagagatgagctgaccaagaaccaggtgtccctgacctgcctggtgaagggcttctaccccagcgacatcgccgtggagtgggagagcaacggccagcccgagaacaactacaagaccaccccccctgtgctggacagcgatggcagcttcttcctgtacagcaagctgaccgtggacaagagcagatggcagcagggcaacgtgttcagctgcagcgtgatgcacgaggccctgcacaatcactacacccagaagagcctgagcctgtcccctggcaagtga

SEQ ID NO: 360 - DNA, 1026 bp, Artificial Sequence
  Synthetic
gacatccagatgacccagagccccagcagcctgagcgcctctgtgggcgatagagtgaccatcacctgcagagccagccaggccatcgacagctacctgcactggtatcagcagcagcctggcaaggcccctaagctgctgatctacagcgccagcaatctggagaccggcgtgcctagcagattcagcggcagcggctccggcaccgacttcaccctgaccatcagcagcctgctgcctgaggatttcgccacctactactgccagcaggtggtgtggagacctttcaccttcggccagggcaccaaggtggagatcaagcgggtggagcccaagagcagcgataagacccacacctgccccccctgccctgcccccgagctgctgggcggacccagcgtgttcctgttcccccccaagcctaaggacaccctgatgatcagcagaacccccgaggtgacctgcgtggtggtggatgtgagccacgaggaccctgaggtgaagttcaactggtacgtggacggcgtggaggtgcacaatgccaagaccaagcccagggaggagcagtacaacagcacctaccgggtggtgtccgtgctgaccgtgctgcaccaggattggctgaacggcaaggagtacaagtgcaaggtgtccaacaaggccctgcctgcccctatcgagaaaaccatcagcaaggccaagggccagcccagagagccccaggtgtacaccctgccccctagcagagatgagctgaccaagaaccaggtgtccctgacctgcctggtgaagggcttctaccccagcgacatcgccgtggagtgggagagcaacggccagcccgagaacaactacaagaccaccccccctgtgctggacagcgatggcagcttcttcctgtacagcaagctgaccgtggacaagagcagatggcagcagggcaacgtgttcagctgcagcgtgatgcacgaggccctgcacaatcactacacccagaagagcctgagcctgtcccctggcaagtga

SEQ ID NO: 361 - DNA, 1026 bp, Artificial Sequence
  Synthetic
gacatccagatgacccagagccccagcagcctgagcgcctctgtgggcgatagagtgaccatcacctgcagagccagccaggccatcgacagctacctgcactggtatcagcagcaccctggcaaggcccctaagctgctgatctacagcgccagcaatctggagaccggcgtgcctagcagattcagcggcagcggctccggcaccgacttcaccctgaccatcagcagcctgctgcctgaggatttcgccacctactactgccagcaggtggtgtggagacctttcaccttcggccagggcaccaaggtggagatcaagcgggtggagcccaagagcagcgataagacccacacctgccccccctgccctgcccccgagctgctgggcggacccagcgtgttcctgttcccccccaagcctaaggacaccctgatgatcagcagaacccccgaggtgacctgcgtggtggtggatgtgagccacgaggaccctgaggtgaagttcaactggtacgtggacggcgtggaggtgcacaatgccaagaccaagcccagggaggagcagtacaacagcacctaccgggtggtgtccgtgctgaccgtgctgcaccaggattggctgaacggcaaggagtacaagtgcaaggtgtccaacaaggccctgcctgcccctatcgagaaaaccatcagcaaggccaagggccagcccagagagccccaggtgtacaccctgccccctagcagagatgagctgaccaagaaccaggtgtccctgacctgcctggtgaagggcttctaccccagcgacatcgccgtggagtgggagagcaacggccagcccgagaacaactacaagaccaccccccctgtgctggacagcgatggcagcttcttcctgtacagcaagctgaccgtggacaagagcagatggcagcagggcaacgtgttcagctgcagcgtgatgcacgaggccctgcacaatcactacacccagaagagcctgagcctgtcccctggcaagtga

SEQ ID NO: 362 - DNA, 1026 bp, Artificial Sequence
  Synthetic
gacatccagatgacccagagccccagcagcctgagcgcctctgtgggcgatagagtgaccatcacctgcagagccagccaggccatcgacagctacctgcactggtatcagcagccccctggcaaggcccctaagctgctgatctacagcgccagcaatctggagaccggcgtgcctagcagattcagcggcagcggctccggcaccgacttcaccctgaccatcagcagcctgctgcctgaggatttcgccacctactactgccagcaggtggtgtggagacctttcaccttcggccagggcaccaaggtggagatcaagcgggtggagcccaagagcagcgataagacccacacctgccccccctgccctgcccccgagctgctgggcggacccagcgtgttcctgttcccccccaagcctaaggacaccctgatgatcagcagaacccccgaggtgacctgcgtggtggtggatgtgagccacgaggaccctgaggtgaagttcaactggtacgtggacggcgtggaggtgcacaatgccaagaccaagcccagggaggagcagtacaacagcacctaccgggtggtgtccgtgctgaccgtgctgcaccaggattggctgaacggcaaggagtacaagtgcaaggtgtccaacaaggccctgcctgcccctatcgagaaaaccatcagcaaggccaagggccagcccagagagccccaggtgtacaccctgccccctagcagagatgagctgaccaagaaccaggtgtccctgacctgcctggtgaagggcttctaccccagcgacatcgccgtggagtgggagagcaacggccagcccgagaacaactacaagaccaccccccctgtgctggacagcgatggcagcttcttcctgtacagcaagctgaccgtggacaagagcagatggcagcagggcaacgtgttcagctgcagcgtgatgcacgaggccctgcacaatcactacacccagaagagcctgagcctgtcccctggcaagtga

SEQ ID NO: 363 - DNA, 1026 bp, Artificial Sequence
  Synthetic
gacatccagatgacccagagccccagcagcctgagcgcctctgtgggcgatagagtgaccatcacctgcagagccagccaggccatcgacagctacctgcactggtatcagcagaagagcggcaaggcccctaagctgctgatctacagcgccagcaatctggagaccggcgtgcctagcagattcagcggcagcggctccggcaccgacttcaccctgaccatcagcagcctgctgcctgaggatttcgccacctactactgccagcaggtggtgtggagacctttcaccttcggccagggcaccaaggtggagatcaagcgggtggagcccaagagcagcgataagacccacacctgccccccctgccctgcccccgagctgctgggcggacccagcgtgttcctgttcccccccaagcctaaggacaccctgatgatcagcagaacccccgaggtgacctgcgtggtggtggatgtgagccacgaggaccctgaggtgaagttcaactggtacgtggacggcgtggaggtgcacaatgccaagaccaagcccagggaggagcagtacaacagcacctaccgggtggtgtccgtgctgaccgtgctgcaccaggattggctgaacggcaaggagtacaagtgcaaggtgtccaacaaggccctgcctgcccctatcgagaaaaccatcagcaaggccaagggccagcccagagagccccaggtgtacaccctgccccctagcagagatgagctgaccaagaaccaggtgtccctgacctgcctggtgaagggcttctaccccagcgacatcgccgtggagtgggagagcaacggccagcccgagaacaactacaagaccaccccccctgtgctggacagcgatggcagcttcttcctgtacagcaagctgaccgtggacaagagcagatggcagcagggcaacgtgttcagctgcagcgtgatgcacgaggccctgcacaatcactacacccagaagagcctgagcctgtcccctggcaagtga

SEQ ID NO: 364 - DNA, 1026 bp, Artificial Sequence
  Synthetic
gacatccagatgacccagagccccagcagcctgagcgcctctgtgggcgatagagtgaccatcacctgcagagccagccaggccatcgacagctacctgcactggtatcagcagaagctgggcaaggcccctaagctgctgatctacagcgccagcaatctggagaccggcgtgcctagcagattcagcggcagcggctccggcaccgacttcaccctgaccatcagcagcctgctgcctgaggatttcgccacctactactgccagcaggtggtgtggagacctttcaccttcggccagggcaccaaggtggagatcaagcgggtggagcccaagagcagcgataagacccacacctgccccccctgccctgcccccgagctgctgggcggacccagcgtgttcctgttcccccccaagcctaaggacaccctgatgatcagcagaacccccgaggtgacctgcgtggtggtggatgtgagccacgaggaccctgaggtgaagttcaactggtacgtggacggcgtggaggtgcacaatgccaagaccaagcccagggaggagcagtacaacagcacctaccgggtggtgtccgtgctgaccgtgctgcaccaggattggctgaacggcaaggagtacaagtgcaaggtgtccaacaaggccctgcctgcccctatcgagaaaaccatcagcaaggccaagggccagcccagagagccccaggtgtacaccctgccccctagcagagatgagctgaccaagaaccaggtgtccctgacctgcctggtgaagggcttctaccccagcgacatcgccgtggagtgggagagcaacggccagcccgagaacaactacaagaccaccccccctgtgctggacagcgatggcagcttcttcctgtacagcaagctgaccgtggacaagagcagatggcagcagggcaacgtgttcagctgcagcgtgatgcacgaggccctgcacaatcactacacccagaagagcctgagcctgtcccctggcaagtga

SEQ ID NO: 365 - DNA, 1026 bp, Artificial Sequence
  Synthetic
gacatccagatgacccagagccccagcagcctgagcgcctctgtgggcgatagagtgaccatcacctgcagagccagccaggccatcgacagctacctgcactggtatcagcagaagtacggcaaggcccctaagctgctgatctacagcgccagcaatctggagaccggcgtgcctagcagattcagcggcagcggctccggcaccgacttcaccctgaccatcagcagcctgctgcctgaggatttcgccacctactactgccagcaggtggtgtggagacctttcaccttcggccagggcaccaaggtggagatcaagcgggtggagcccaagagcagcgataagacccacacctgccccccctgccctgcccccgagctgctgggcggacccagcgtgttcctgttcccccccaagcctaaggacaccctgatgatcagcagaacccccgaggtgacctgcgtggtggtggatgtgagccacgaggaccctgaggtgaagttcaactggtacgtggacggcgtggaggtgcacaatgccaagaccaagcccagggaggagcagtacaacagcacctaccgggtggtgtccgtgctgaccgtgctgcaccaggattggctgaacggcaaggagtacaagtgcaaggtgtccaacaaggccctgcctgcccctatcgagaaaaccatcagcaaggccaagggccagcccagagagccccaggtgtacaccctgccccctagcagagatgagctgaccaagaaccaggtgtccctgacctgcctggtgaagggcttctaccccagcgacatcgccgtggagtgggagagcaacggccagcccgagaacaactacaagaccaccccccctgtgctggacagcgatggcagcttcttcctgtacagcaagctgaccgtggacaagagcagatggcagcagggcaacgtgttcagctgcagcgtgatgcacgaggccctgcacaatcactacacccagaagagcctgagcctgtcccctggcaagtga

SEQ ID NO: 366 - DNA, 1026 bp, Artificial Sequence
  Synthetic
gacatccagatgacccagagccccagcagcctgagcgcctctgtgggcgatagagtgaccatcacctgcagagccagccaggccatcgacagctacctgcactggtatcagcagaaggacggcaaggcccctaagctgctgatctacagcgccagcaatctggagaccggcgtgcctagcagattcagcggcagcggctccggcaccgacttcaccctgaccatcagcagcctgctgcctgaggatttcgccacctactactgccagcaggtggtgtggagacctttcaccttcggccagggcaccaaggtggagatcaagcgggtggagcccaagagcagcgataagacccacacctgccccccctgccctgcccccgagctgctgggcggacccagcgtgttcctgttcccccccaagcctaaggacaccctgatgatcagcagaacccccgaggtgacctgcgtggtggtggatgtgagccacgaggaccctgaggtgaagttcaactggtacgtggacggcgtggaggtgcacaatgccaagaccaagcccagggaggagcagtacaacagcacctaccgggtggtgtccgtgctgaccgtgctgcaccaggattggctgaacggcaaggagtacaagtgcaaggtgtccaacaaggccctgcctgcccctatcgagaaaaccatcagcaaggccaagggccagcccagagagccccaggtgtacaccctgccccctagcagagatgagctgaccaagaaccaggtgtccctgacctgcctggtgaagggcttctaccccagcgacatcgccgtggagtgggagagcaacggccagcccgagaacaactacaagaccaccccccctgtgctggacagcgatggcagcttcttcctgtacagcaagctgaccgtggacaagagcagatggcagcagggcaacgtgttcagctgcagcgtgatgcacgaggccctgcacaatcactacacccagaagagcctgagcctgtcccctggcaagtga

SEQ ID NO: 367 - DNA, 1026 bp, Artificial Sequence
  Synthetic
gacatccagatgacccagagccccagcagcctgagcgcctctgtgggcgatagagtgaccatcacctgcagagccagccaggccatcgacagctacctgcactggtatcagcagaagcagggcaaggcccctaagctgctgatctacagcgccagcaatctggagaccggcgtgcctagcagattcagcggcagcggctccggcaccgacttcaccctgaccatcagcagcctgctgcctgaggatttcgccacctactactgccagcaggtggtgtggagacctttcaccttcggccagggcaccaaggtggagatcaagcgggtggagcccaagagcagcgataagacccacacctgccccccctgccctgcccccgagctgctgggcggacccagcgtgttcctgttcccccccaagcctaaggacaccctgatgatcagcagaacccccgaggtgacctgcgtggtggtggatgtgagccacgaggaccctgaggtgaagttcaactggtacgtggacggcgtggaggtgcacaatgccaagaccaagcccagggaggagcagtacaacagcacctaccgggtggtgtccgtgctgaccgtgctgcaccaggattggctgaacggcaaggagtacaagtgcaaggtgtccaacaaggccctgcctgcccctatcgagaaaaccatcagcaaggccaagggccagcccagagagccccaggtgtacaccctgccccctagcagagatgagctgaccaagaaccaggtgtccctgacctgcctggtgaagggcttctaccccagcgacatcgccgtggagtgggagagcaacggccagcccgagaacaactacaagaccaccccccctgtgctggacagcgatggcagcttcttcctgtacagcaagctgaccgtggacaagagcagatggcagcagggcaacgtgttcagctgcagcgtgatgcacgaggccctgcacaatcactacacccagaagagcctgagcctgtcccctggcaagtga

SEQ ID NO: 368 - DNA, 1026 bp, Artificial Sequence
  Synthetic
gacatccagatgacccagagccccagcagcctgagcgcctctgtgggcgatagagtgaccatcacctgcagagccagccaggccatcgacagctacctgcactggtatcagcagaagcacggcaaggcccctaagctgctgatctacagcgccagcaatctggagaccggcgtgcctagcagattcagcggcagcggctccggcaccgacttcaccctgaccatcagcagcctgctgcctgaggatttcgccacctactactgccagcaggtggtgtggagacctttcaccttcggccagggcaccaaggtggagatcaagcgggtggagcccaagagcagcgataagacccacacctgccccccctgccctgcccccgagctgctgggcggacccagcgtgttcctgttcccccccaagcctaaggacaccctgatgatcagcagaacccccgaggtgacctgcgtggtggtggatgtgagccacgaggaccctgaggtgaagttcaactggtacgtggacggcgtggaggtgcacaatgccaagaccaagcccagggaggagcagtacaacagcacctaccgggtggtgtccgtgctgaccgtgctgcaccaggattggctgaacggcaaggagtacaagtgcaaggtgtccaacaaggccctgcctgcccctatcgagaaaaccatcagcaaggccaagggccagcccagagagccccaggtgtacaccctgccccctagcagagatgagctgaccaagaaccaggtgtccctgacctgcctggtgaagggcttctaccccagcgacatcgccgtggagtgggagagcaacggccagcccgagaacaactacaagaccaccccccctgtgctggacagcgatggcagcttcttcctgtacagcaagctgaccgtggacaagagcagatggcagcagggcaacgtgttcagctgcagcgtgatgcacgaggccctgcacaatcactacacccagaagagcctgagcctgtcccctggcaagtga

SEQ ID NO: 369 - DNA, 1026 bp, Artificial Sequence
  Synthetic
gacatccagatgacccagagccccagcagcctgagcgcctctgtgggcgatagagtgaccatcacctgcagagccagccaggccatcgacagctacctgcactggtatcagcagaagaagggcaaggcccctaagctgctgatctacagcgccagcaatctggagaccggcgtgcctagcagattcagcggcagcggctccggcaccgacttcaccctgaccatcagcagcctgctgcctgaggatttcgccacctactactgccagcaggtggtgtggagacctttcaccttcggccagggcaccaaggtggagatcaagcgggtggagcccaagagcagcgataagacccacacctgccccccctgccctgcccccgagctgctgggcggacccagcgtgttcctgttcccccccaagcctaaggacaccctgatgatcagcagaacccccgaggtgacctgcgtggtggtggatgtgagccacgaggaccctgaggtgaagttcaactggtacgtggacggcgtggaggtgcacaatgccaagaccaagcccagggaggagcagtacaacagcacctaccgggtggtgtccgtgctgaccgtgctgcaccaggattggctgaacggcaaggagtacaagtgcaaggtgtccaacaaggccctgcctgcccctatcgagaaaaccatcagcaaggccaagggccagcccagagagccccaggtgtacaccctgccccctagcagagatgagctgaccaagaaccaggtgtccctgacctgcctggtgaagggcttctaccccagcgacatcgccgtggagtgggagagcaacggccagcccgagaacaactacaagaccaccccccctgtgctggacagcgatggcagcttcttcctgtacagcaagctgaccgtggacaagagcagatggcagcagggcaacgtgttcagctgcagcgtgatgcacgaggccctgcacaatcactacacccagaagagcctgagcctgtcccctggcaagtga

SEQ ID NO: 370 - DNA, 1026 bp, Artificial Sequence
  Synthetic
gacatccagatgacccagagccccagcagcctgagcgcctctgtgggcgatagagtgaccatcacctgcagagccagccaggccatcgacagctacctgcactggtatcagcagaagcctagcaaggcccctaagctgctgatctacagcgccagcaatctggagaccggcgtgcctagcagattcagcggcagcggctccggcaccgacttcaccctgaccatcagcagcctgctgcctgaggatttcgccacctactactgccagcaggtggtgtggagacctttcaccttcggccagggcaccaaggtggagatcaagcgggtggagcccaagagcagcgataagacccacacctgccccccctgccctgcccccgagctgctgggcggacccagcgtgttcctgttcccccccaagcctaaggacaccctgatgatcagcagaacccccgaggtgacctgcgtggtggtggatgtgagccacgaggaccctgaggtgaagttcaactggtacgtggacggcgtggaggtgcacaatgccaagaccaagcccagggaggagcagtacaacagcacctaccgggtggtgtccgtgctgaccgtgctgcaccaggattggctgaacggcaaggagtacaagtgcaaggtgtccaacaaggccctgcctgcccctatcgagaaaaccatcagcaaggccaagggccagcccagagagccccaggtgtacaccctgccccctagcagagatgagctgaccaagaaccaggtgtccctgacctgcctggtgaagggcttctaccccagcgacatcgccgtggagtgggagagcaacggccagcccgagaacaactacaagaccaccccccctgtgctggacagcgatggcagcttcttcctgtacagcaagctgaccgtggacaagagcagatggcagcagggcaacgtgttcagctgcagcgtgatgcacgaggccctgcacaatcactacacccagaagagcctgagcctgtcccctggcaagtga

SEQ ID NO: 371 - DNA, 1026 bp, Artificial Sequence
  Synthetic
gacatccagatgacccagagccccagcagcctgagcgcctctgtgggcgatagagtgaccatcacctgcagagccagccaggccatcgacagctacctgcactggtatcagcagaagcctctgaaggcccctaagctgctgatctacagcgccagcaatctggagaccggcgtgcctagcagattcagcggcagcggctccggcaccgacttcaccctgaccatcagcagcctgctgcctgaggatttcgccacctactactgccagcaggtggtgtggagacctttcaccttcggccagggcaccaaggtggagatcaagcgggtggagcccaagagcagcgataagacccacacctgccccccctgccctgcccccgagctgctgggcggacccagcgtgttcctgttcccccccaagcctaaggacaccctgatgatcagcagaacccccgaggtgacctgcgtggtggtggatgtgagccacgaggaccctgaggtgaagttcaactggtacgtggacggcgtggaggtgcacaatgccaagaccaagcccagggaggagcagtacaacagcacctaccgggtggtgtccgtgctgaccgtgctgcaccaggattggctgaacggcaaggagtacaagtgcaaggtgtccaacaaggccctgcctgcccctatcgagaaaaccatcagcaaggccaagggccagcccagagagccccaggtgtacaccctgccccctagcagagatgagctgaccaagaaccaggtgtccctgacctgcctggtgaagggcttctaccccagcgacatcgccgtggagtgggagagcaacggccagcccgagaacaactacaagaccaccccccctgtgctggacagcgatggcagcttcttcctgtacagcaagctgaccgtggacaagagcagatggcagcagggcaacgtgttcagctgcagcgtgatgcacgaggccctgcacaatcactacacccagaagagcctgagcctgtcccctggcaagtga

SEQ ID NO: 372 - DNA, 1026 bp, Artificial Sequence
  Synthetic
gacatccagatgacccagagccccagcagcctgagcgcctctgtgggcgatagagtgaccatcacctgcagagccagccaggccatcgacagctacctgcactggtatcagcagaagccttacaaggcccctaagctgctgatctacagcgccagcaatctggagaccggcgtgcctagcagattcagcggcagcggctccggcaccgacttcaccctgaccatcagcagcctgctgcctgaggatttcgccacctactactgccagcaggtggtgtggagacctttcaccttcggccagggcaccaaggtggagatcaagcgggtggagcccaagagcagcgataagacccacacctgccccccctgccctgcccccgagctgctgggcggacccagcgtgttcctgttcccccccaagcctaaggacaccctgatgatcagcagaacccccgaggtgacctgcgtggtggtggatgtgagccacgaggaccctgaggtgaagttcaactggtacgtggacggcgtggaggtgcacaatgccaagaccaagcccagggaggagcagtacaacagcacctaccgggtggtgtccgtgctgaccgtgctgcaccaggattggctgaacggcaaggagtacaagtgcaaggtgtccaacaaggccctgcctgcccctatcgagaaaaccatcagcaaggccaagggccagcccagagagccccaggtgtacaccctgccccctagcagagatgagctgaccaagaaccaggtgtccctgacctgcctggtgaagggcttctaccccagcgacatcgccgtggagtgggagagcaacggccagcccgagaacaactacaagaccaccccccctgtgctggacagcgatggcagcttcttcctgtacagcaagctgaccgtggacaagagcagatggcagcagggcaacgtgttcagctgcagcgtgatgcacgaggccctgcacaatcactacacccagaagagcctgagcctgtcccctggcaagtga

SEQ ID NO: 373 - DNA, 1026 bp, Artificial Sequence
  Synthetic
gacatccagatgacccagagccccagcagcctgagcgcctctgtgggcgatagagtgaccatcacctgcagagccagccaggccatcgacagctacctgcactggtatcagcagaagcctcagaaggcccctaagctgctgatctacagcgccagcaatctggagaccggcgtgcctagcagattcagcggcagcggctccggcaccgacttcaccctgaccatcagcagcctgctgcctgaggatttcgccacctactactgccagcaggtggtgtggagacctttcaccttcggccagggcaccaaggtggagatcaagcgggtggagcccaagagcagcgataagacccacacctgccccccctgccctgcccccgagctgctgggcggacccagcgtgttcctgttcccccccaagcctaaggacaccctgatgatcagcagaacccccgaggtgacctgcgtggtggtggatgtgagccacgaggaccctgaggtgaagttcaactggtacgtggacggcgtggaggtgcacaatgccaagaccaagcccagggaggagcagtacaacagcacctaccgggtggtgtccgtgctgaccgtgctgcaccaggattggctgaacggcaaggagtacaagtgcaaggtgtccaacaaggccctgcctgcccctatcgagaaaaccatcagcaaggccaagggccagcccagagagccccaggtgtacaccctgccccctagcagagatgagctgaccaagaaccaggtgtccctgacctgcctggtgaagggcttctaccccagcgacatcgccgtggagtgggagagcaacggccagcccgagaacaactacaagaccaccccccctgtgctggacagcgatggcagcttcttcctgtacagcaagctgaccgtggacaagagcagatggcagcagggcaacgtgttcagctgcagcgtgatgcacgaggccctgcacaatcactacacccagaagagcctgagcctgtcccctggcaagtga

SEQ ID NO: 374 - DNA, 1026 bp, Artificial Sequence
  Synthetic
gacatccagatgacccagagccccagcagcctgagcgcctctgtgggcgatagagtgaccatcacctgcagagccagccaggccatcgacagctacctgcactggtatcagcagaagcctcacaaggcccctaagctgctgatctacagcgccagcaatctggagaccggcgtgcctagcagattcagcggcagcggctccggcaccgacttcaccctgaccatcagcagcctgctgcctgaggatttcgccacctactactgccagcaggtggtgtggagacctttcaccttcggccagggcaccaaggtggagatcaagcgggtggagcccaagagcagcgataagacccacacctgccccccctgccctgcccccgagctgctgggcggacccagcgtgttcctgttcccccccaagcctaaggacaccctgatgatcagcagaacccccgaggtgacctgcgtggtggtggatgtgagccacgaggaccctgaggtgaagttcaactggtacgtggacggcgtggaggtgcacaatgccaagaccaagcccagggaggagcagtacaacagcacctaccgggtggtgtccgtgctgaccgtgctgcaccaggattggctgaacggcaaggagtacaagtgcaaggtgtccaacaaggccctgcctgcccctatcgagaaaaccatcagcaaggccaagggccagcccagagagccccaggtgtacaccctgccccctagcagagatgagctgaccaagaaccaggtgtccctgacctgcctggtgaagggcttctaccccagcgacatcgccgtggagtgggagagcaacggccagcccgagaacaactacaagaccaccccccctgtgctggacagcgatggcagcttcttcctgtacagcaagctgaccgtggacaagagcagatggcagcagggcaacgtgttcagctgcagcgtgatgcacgaggccctgcacaatcactacacccagaagagcctgagcctgtcccctggcaagtga

SEQ ID NO: 375 - DNA, 1026 bp, Artificial Sequence
  Synthetic
gacatccagatgacccagagccccagcagcctgagcgcctctgtgggcgatagagtgaccatcacctgcagagccagccaggccatcgacagctacctgcactggtatcagcagaagcctcccaaggcccctaagctgctgatctacagcgccagcaatctggagaccggcgtgcctagcagattcagcggcagcggctccggcaccgacttcaccctgaccatcagcagcctgctgcctgaggatttcgccacctactactgccagcaggtggtgtggagacctttcaccttcggccagggcaccaaggtggagatcaagcgggtggagcccaagagcagcgataagacccacacctgccccccctgccctgcccccgagctgctgggcggacccagcgtgttcctgttcccccccaagcctaaggacaccctgatgatcagcagaacccccgaggtgacctgcgtggtggtggatgtgagccacgaggaccctgaggtgaagttcaactggtacgtggacggcgtggaggtgcacaatgccaagaccaagcccagggaggagcagtacaacagcacctaccgggtggtgtccgtgctgaccgtgctgcaccaggattggctgaacggcaaggagtacaagtgcaaggtgtccaacaaggccctgcctgcccctatcgagaaaaccatcagcaaggccaagggccagcccagagagccccaggtgtacaccctgccccctagcagagatgagctgaccaagaaccaggtgtccctgacctgcctggtgaagggcttctaccccagcgacatcgccgtggagtgggagagcaacggccagcccgagaacaactacaagaccaccccccctgtgctggacagcgatggcagcttcttcctgtacagcaagctgaccgtggacaagagcagatggcagcagggcaacgtgttcagctgcagcgtgatgcacgaggccctgcacaatcactacacccagaagagcctgagcctgtcccctggcaagtga

SEQ ID NO: 376 - DNA, 1026 bp, Artificial Sequence
  Synthetic
gacatccagatgacccagagccccagcagcctgagcgcctctgtgggcgatagagtgaccatcacctgcagagccagccaggccatcgacagctacctgcactggtatcagcagaagcctaagaaggcccctaagctgctgatctacagcgccagcaatctggagaccggcgtgcctagcagattcagcggcagcggctccggcaccgacttcaccctgaccatcagcagcctgctgcctgaggatttcgccacctactactgccagcaggtggtgtggagacctttcaccttcggccagggcaccaaggtggagatcaagcgggtggagcccaagagcagcgataagacccacacctgccccccctgccctgcccccgagctgctgggcggacccagcgtgttcctgttcccccccaagcctaaggacaccctgatgatcagcagaacccccgaggtgacctgcgtggtggtggatgtgagccacgaggaccctgaggtgaagttcaactggtacgtggacggcgtggaggtgcacaatgccaagaccaagcccagggaggagcagtacaacagcacctaccgggtggtgtccgtgctgaccgtgctgcaccaggattggctgaacggcaaggagtacaagtgcaaggtgtccaacaaggccctgcctgcccctatcgagaaaaccatcagcaaggccaagggccagcccagagagccccaggtgtacaccctgccccctagcagagatgagctgaccaagaaccaggtgtccctgacctgcctggtgaagggcttctaccccagcgacatcgccgtggagtgggagagcaacggccagcccgagaacaactacaagaccaccccccctgtgctggacagcgatggcagcttcttcctgtacagcaagctgaccgtggacaagagcagatggcagcagggcaacgtgttcagctgcagcgtgatgcacgaggccctgcacaatcactacacccagaagagcctgagcctgtcccctggcaagtga

SEQ ID NO: 377 - DNA, 1026 bp, Artificial Sequence
  Synthetic
gacatccagatgacccagagccccagcagcctgagcgcctctgtgggcgatagagtgaccatcacctgcagagccagccaggccatcgacagctacctgcactggtatcagcagaagcctggcagcgcccctaagctgctgatctacagcgccagcaatctggagaccggcgtgcctagcagattcagcggcagcggctccggcaccgacttcaccctgaccatcagcagcctgctgcctgaggatttcgccacctactactgccagcaggtggtgtggagacctttcaccttcggccagggcaccaaggtggagatcaagcgggtggagcccaagagcagcgataagacccacacctgccccccctgccctgcccccgagctgctgggcggacccagcgtgttcctgttcccccccaagcctaaggacaccctgatgatcagcagaacccccgaggtgacctgcgtggtggtggatgtgagccacgaggaccctgaggtgaagttcaactggtacgtggacggcgtggaggtgcacaatgccaagaccaagcccagggaggagcagtacaacagcacctaccgggtggtgtccgtgctgaccgtgctgcaccaggattggctgaacggcaaggagtacaagtgcaaggtgtccaacaaggccctgcctgcccctatcgagaaaaccatcagcaaggccaagggccagcccagagagccccaggtgtacaccctgccccctagcagagatgagctgaccaagaaccaggtgtccctgacctgcctggtgaagggcttctaccccagcgacatcgccgtggagtgggagagcaacggccagcccgagaacaactacaagaccaccccccctgtgctggacagcgatggcagcttcttcctgtacagcaagctgaccgtggacaagagcagatggcagcagggcaacgtgttcagctgcagcgtgatgcacgaggccctgcacaatcactacacccagaagagcctgagcctgtcccctggcaagtga

SEQ ID NO: 378 - DNA, 1026 bp, Artificial Sequence
  Synthetic
gacatccagatgacccagagccccagcagcctgagcgcctctgtgggcgatagagtgaccatcacctgcagagccagccaggccatcgacagctacctgcactggtatcagcagaagcctggctacgcccctaagctgctgatctacagcgccagcaatctggagaccggcgtgcctagcagattcagcggcagcggctccggcaccgacttcaccctgaccatcagcagcctgctgcctgaggatttcgccacctactactgccagcaggtggtgtggagacctttcaccttcggccagggcaccaaggtggagatcaagcgggtggagcccaagagcagcgataagacccacacctgccccccctgccctgcccccgagctgctgggcggacccagcgtgttcctgttcccccccaagcctaaggacaccctgatgatcagcagaacccccgaggtgacctgcgtggtggtggatgtgagccacgaggaccctgaggtgaagttcaactggtacgtggacggcgtggaggtgcacaatgccaagaccaagcccagggaggagcagtacaacagcacctaccgggtggtgtccgtgctgaccgtgctgcaccaggattggctgaacggcaaggagtacaagtgcaaggtgtccaacaaggccctgcctgcccctatcgagaaaaccatcagcaaggccaagggccagcccagagagccccaggtgtacaccctgccccctagcagagatgagctgaccaagaaccaggtgtccctgacctgcctggtgaagggcttctaccccagcgacatcgccgtggagtgggagagcaacggccagcccgagaacaactacaagaccaccccccctgtgctggacagcgatggcagcttcttcctgtacagcaagctgaccgtggacaagagcagatggcagcagggcaacgtgttcagctgcagcgtgatgcacgaggccctgcacaatcactacacccagaagagcctgagcctgtcccctggcaagtga

SEQ ID NO: 379 - DNA, 1026 bp, Artificial Sequence
  Synthetic
gacatccagatgacccagagccccagcagcctgagcgcctctgtgggcgatagagtgaccatcacctgcagagccagccaggccatcgacagctacctgcactggtatcagcagaagcctggcgacgcccctaagctgctgatctacagcgccagcaatctggagaccggcgtgcctagcagattcagcggcagcggctccggcaccgacttcaccctgaccatcagcagcctgctgcctgaggatttcgccacctactactgccagcaggtggtgtggagacctttcaccttcggccagggcaccaaggtggagatcaagcgggtggagcccaagagcagcgataagacccacacctgccccccctgccctgcccccgagctgctgggcggacccagcgtgttcctgttcccccccaagcctaaggacaccctgatgatcagcagaacccccgaggtgacctgcgtggtggtggatgtgagccacgaggaccctgaggtgaagttcaactggtacgtggacggcgtggaggtgcacaatgccaagaccaagcccagggaggagcagtacaacagcacctaccgggtggtgtccgtgctgaccgtgctgcaccaggattggctgaacggcaaggagtacaagtgcaaggtgtccaacaaggccctgcctgcccctatcgagaaaaccatcagcaaggccaagggccagcccagagagccccaggtgtacaccctgccccctagcagagatgagctgaccaagaaccaggtgtccctgacctgcctggtgaagggcttctaccccagcgacatcgccgtggagtgggagagcaacggccagcccgagaacaactacaagaccaccccccctgtgctggacagcgatggcagcttcttcctgtacagcaagctgaccgtggacaagagcagatggcagcagggcaacgtgttcagctgcagcgtgatgcacgaggccctgcacaatcactacacccagaagagcctgagcctgtcccctggcaagtga

SEQ ID NO: 380 - DNA, 1026 bp, Artificial Sequence
  Synthetic
gacatccagatgacccagagccccagcagcctgagcgcctctgtgggcgatagagtgaccatcacctgcagagccagccaggccatcgacagctacctgcactggtatcagcagaagcctggccacgcccctaagctgctgatctacagcgccagcaatctggagaccggcgtgcctagcagattcagcggcagcggctccggcaccgacttcaccctgaccatcagcagcctgctgcctgaggatttcgccacctactactgccagcaggtggtgtggagacctttcaccttcggccagggcaccaaggtggagatcaagcgggtggagcccaagagcagcgataagacccacacctgccccccctgccctgcccccgagctgctgggcggacccagcgtgttcctgttcccccccaagcctaaggacaccctgatgatcagcagaacccccgaggtgacctgcgtggtggtggatgtgagccacgaggaccctgaggtgaagttcaactggtacgtggacggcgtggaggtgcacaatgccaagaccaagcccagggaggagcagtacaacagcacctaccgggtggtgtccgtgctgaccgtgctgcaccaggattggctgaacggcaaggagtacaagtgcaaggtgtccaacaaggccctgcctgcccctatcgagaaaaccatcagcaaggccaagggccagcccagagagccccaggtgtacaccctgccccctagcagagatgagctgaccaagaaccaggtgtccctgacctgcctggtgaagggcttctaccccagcgacatcgccgtggagtgggagagcaacggccagcccgagaacaactacaagaccaccccccctgtgctggacagcgatggcagcttcttcctgtacagcaagctgaccgtggacaagagcagatggcagcagggcaacgtgttcagctgcagcgtgatgcacgaggccctgcacaatcactacacccagaagagcctgagcctgtcccctggcaagtga

SEQ ID NO: 381 - DNA, 1026 bp, Artificial Sequence
  Synthetic
gacatccagatgacccagagccccagcagcctgagcgcctctgtgggcgatagagtgaccatcacctgcagagccagccaggccatcgacagctacctgcactggtatcagcagaagcctggccccgcccctaagctgctgatctacagcgccagcaatctggagaccggcgtgcctagcagattcagcggcagcggctccggcaccgacttcaccctgaccatcagcagcctgctgcctgaggatttcgccacctactactgccagcaggtggtgtggagacctttcaccttcggccagggcaccaaggtggagatcaagcgggtggagcccaagagcagcgataagacccacacctgccccccctgccctgcccccgagctgctgggcggacccagcgtgttcctgttcccccccaagcctaaggacaccctgatgatcagcagaacccccgaggtgacctgcgtggtggtggatgtgagccacgaggaccctgaggtgaagttcaactggtacgtggacggcgtggaggtgcacaatgccaagaccaagcccagggaggagcagtacaacagcacctaccgggtggtgtccgtgctgaccgtgctgcaccaggattggctgaacggcaaggagtacaagtgcaaggtgtccaacaaggccctgcctgcccctatcgagaaaaccatcagcaaggccaagggccagcccagagagccccaggtgtacaccctgccccctagcagagatgagctgaccaagaaccaggtgtccctgacctgcctggtgaagggcttctaccccagcgacatcgccgtggagtgggagagcaacggccagcccgagaacaactacaagaccaccccccctgtgctggacagcgatggcagcttcttcctgtacagcaagctgaccgtggacaagagcagatggcagcagggcaacgtgttcagctgcagcgtgatgcacgaggccctgcacaatcactacacccagaagagcctgagcctgtcccctggcaagtga

SEQ ID NO: 382 - DNA, 1026 bp, Artificial Sequence
  Synthetic
gacatccagatgacccagagccccagcagcctgagcgcctctgtgggcgatagagtgaccatcacctgcagagccagccaggccatcgacagctacctgcactggtatcagcagaagcctggcaagctgcctaagctgctgatctacagcgccagcaatctggagaccggcgtgcctagcagattcagcggcagcggctccggcaccgacttcaccctgaccatcagcagcctgctgcctgaggatttcgccacctactactgccagcaggtggtgtggagacctttcaccttcggccagggcaccaaggtggagatcaagcgggtggagcccaagagcagcgataagacccacacctgccccccctgccctgcccccgagctgctgggcggacccagcgtgttcctgttcccccccaagcctaaggacaccctgatgatcagcagaacccccgaggtgacctgcgtggtggtggatgtgagccacgaggaccctgaggtgaagttcaactggtacgtggacggcgtggaggtgcacaatgccaagaccaagcccagggaggagcagtacaacagcacctaccgggtggtgtccgtgctgaccgtgctgcaccaggattggctgaacggcaaggagtacaagtgcaaggtgtccaacaaggccctgcctgcccctatcgagaaaaccatcagcaaggccaagggccagcccagagagccccaggtgtacaccctgccccctagcagagatgagctgaccaagaaccaggtgtccctgacctgcctggtgaagggcttctaccccagcgacatcgccgtggagtgggagagcaacggccagcccgagaacaactacaagaccaccccccctgtgctggacagcgatggcagcttcttcctgtacagcaagctgaccgtggacaagagcagatggcagcagggcaacgtgttcagctgcagcgtgatgcacgaggccctgcacaatcactacacccagaagagcctgagcctgtcccctggcaagtga

SEQ ID NO: 383 - DNA, 1026 bp, Artificial Sequence
  Synthetic
gacatccagatgacccagagccccagcagcctgagcgcctctgtgggcgatagagtgaccatcacctgcagagccagccaggccatcgacagctacctgcactggtatcagcagaagcctggcaagtaccctaagctgctgatctacagcgccagcaatctggagaccggcgtgcctagcagattcagcggcagcggctccggcaccgacttcaccctgaccatcagcagcctgctgcctgaggatttcgccacctactactgccagcaggtggtgtggagacctttcaccttcggccagggcaccaaggtggagatcaagcgggtggagcccaagagcagcgataagacccacacctgccccccctgccctgcccccgagctgctgggcggacccagcgtgttcctgttcccccccaagcctaaggacaccctgatgatcagcagaacccccgaggtgacctgcgtggtggtggatgtgagccacgaggaccctgaggtgaagttcaactggtacgtggacggcgtggaggtgcacaatgccaagaccaagcccagggaggagcagtacaacagcacctaccgggtggtgtccgtgctgaccgtgctgcaccaggattggctgaacggcaaggagtacaagtgcaaggtgtccaacaaggccctgcctgcccctatcgagaaaaccatcagcaaggccaagggccagcccagagagccccaggtgtacaccctgccccctagcagagatgagctgaccaagaaccaggtgtccctgacctgcctggtgaagggcttctaccccagcgacatcgccgtggagtgggagagcaacggccagcccgagaacaactacaagaccaccccccctgtgctggacagcgatggcagcttcttcctgtacagcaagctgaccgtggacaagagcagatggcagcagggcaacgtgttcagctgcagcgtgatgcacgaggccctgcacaatcactacacccagaagagcctgagcctgtcccctggcaagtga

SEQ ID NO: 384 - DNA, 1026 bp, Artificial Sequence
  Synthetic
gacatccagatgacccagagccccagcagcctgagcgcctctgtgggcgatagagtgaccatcacctgcagagccagccaggccatcgacagctacctgcactggtatcagcagaagcctggcaaggaccctaagctgctgatctacagcgccagcaatctggagaccggcgtgcctagcagattcagcggcagcggctccggcaccgacttcaccctgaccatcagcagcctgctgcctgaggatttcgccacctactactgccagcaggtggtgtggagacctttcaccttcggccagggcaccaaggtggagatcaagcgggtggagcccaagagcagcgataagacccacacctgccccccctgccctgcccccgagctgctgggcggacccagcgtgttcctgttcccccccaagcctaaggacaccctgatgatcagcagaacccccgaggtgacctgcgtggtggtggatgtgagccacgaggaccctgaggtgaagttcaactggtacgtggacggcgtggaggtgcacaatgccaagaccaagcccagggaggagcagtacaacagcacctaccgggtggtgtccgtgctgaccgtgctgcaccaggattggctgaacggcaaggagtacaagtgcaaggtgtccaacaaggccctgcctgcccctatcgagaaaaccatcagcaaggccaagggccagcccagagagccccaggtgtacaccctgccccctagcagagatgagctgaccaagaaccaggtgtccctgacctgcctggtgaagggcttctaccccagcgacatcgccgtggagtgggagagcaacggccagcccgagaacaactacaagaccaccccccctgtgctggacagcgatggcagcttcttcctgtacagcaagctgaccgtggacaagagcagatggcagcagggcaacgtgttcagctgcagcgtgatgcacgaggccctgcacaatcactacacccagaagagcctgagcctgtcccctggcaagtga

SEQ ID NO: 385 - DNA, 1026 bp, Artificial Sequence
  Synthetic
gacatccagatgacccagagccccagcagcctgagcgcctctgtgggcgatagagtgaccatcacctgcagagccagccaggccatcgacagctacctgcactggtatcagcagaagcctggcaagcagcctaagctgctgatctacagcgccagcaatctggagaccggcgtgcctagcagattcagcggcagcggctccggcaccgacttcaccctgaccatcagcagcctgctgcctgaggatttcgccacctactactgccagcaggtggtgtggagacctttcaccttcggccagggcaccaaggtggagatcaagcgggtggagcccaagagcagcgataagacccacacctgccccccctgccctgcccccgagctgctgggcggacccagcgtgttcctgttcccccccaagcctaaggacaccctgatgatcagcagaacccccgaggtgacctgcgtggtggtggatgtgagccacgaggaccctgaggtgaagttcaactggtacgtggacggcgtggaggtgcacaatgccaagaccaagcccagggaggagcagtacaacagcacctaccgggtggtgtccgtgctgaccgtgctgcaccaggattggctgaacggcaaggagtacaagtgcaaggtgtccaacaaggccctgcctgcccctatcgagaaaaccatcagcaaggccaagggccagcccagagagccccaggtgtacaccctgccccctagcagagatgagctgaccaagaaccaggtgtccctgacctgcctggtgaagggcttctaccccagcgacatcgccgtggagtgggagagcaacggccagcccgagaacaactacaagaccaccccccctgtgctggacagcgatggcagcttcttcctgtacagcaagctgaccgtggacaagagcagatggcagcagggcaacgtgttcagctgcagcgtgatgcacgaggccctgcacaatcactacacccagaagagcctgagcctgtcccctggcaagtga

SEQ ID NO: 386 - DNA, 1026 bp, Artificial Sequence
  Synthetic
gacatccagatgacccagagccccagcagcctgagcgcctctgtgggcgatagagtgaccatcacctgcagagccagccaggccatcgacagctacctgcactggtatcagcagaagcctggcaagcaccctaagctgctgatctacagcgccagcaatctggagaccggcgtgcctagcagattcagcggcagcggctccggcaccgacttcaccctgaccatcagcagcctgctgcctgaggatttcgccacctactactgccagcaggtggtgtggagacctttcaccttcggccagggcaccaaggtggagatcaagcgggtggagcccaagagcagcgataagacccacacctgccccccctgccctgcccccgagctgctgggcggacccagcgtgttcctgttcccccccaagcctaaggacaccctgatgatcagcagaacccccgaggtgacctgcgtggtggtggatgtgagccacgaggaccctgaggtgaagttcaactggtacgtggacggcgtggaggtgcacaatgccaagaccaagcccagggaggagcagtacaacagcacctaccgggtggtgtccgtgctgaccgtgctgcaccaggattggctgaacggcaaggagtacaagtgcaaggtgtccaacaaggccctgcctgcccctatcgagaaaaccatcagcaaggccaagggccagcccagagagccccaggtgtacaccctgccccctagcagagatgagctgaccaagaaccaggtgtccctgacctgcctggtgaagggcttctaccccagcgacatcgccgtggagtgggagagcaacggccagcccgagaacaactacaagaccaccccccctgtgctggacagcgatggcagcttcttcctgtacagcaagctgaccgtggacaagagcagatggcagcagggcaacgtgttcagctgcagcgtgatgcacgaggccctgcacaatcactacacccagaagagcctgagcctgtcccctggcaagtga

SEQ ID NO: 387 - DNA, 1026 bp, Artificial Sequence
  Synthetic
gacatccagatgacccagagccccagcagcctgagcgcctctgtgggcgatagagtgaccatcacctgcagagccagccaggccatcgacagctacctgcactggtatcagcagaagcctggcaagaagcctaagctgctgatctacagcgccagcaatctggagaccggcgtgcctagcagattcagcggcagcggctccggcaccgacttcaccctgaccatcagcagcctgctgcctgaggatttcgccacctactactgccagcaggtggtgtggagacctttcaccttcggccagggcaccaaggtggagatcaagcgggtggagcccaagagcagcgataagacccacacctgccccccctgccctgcccccgagctgctgggcggacccagcgtgttcctgttcccccccaagcctaaggacaccctgatgatcagcagaacccccgaggtgacctgcgtggtggtggatgtgagccacgaggaccctgaggtgaagttcaactggtacgtggacggcgtggaggtgcacaatgccaagaccaagcccagggaggagcagtacaacagcacctaccgggtggtgtccgtgctgaccgtgctgcaccaggattggctgaacggcaaggagtacaagtgcaaggtgtccaacaaggccctgcctgcccctatcgagaaaaccatcagcaaggccaagggccagcccagagagccccaggtgtacaccctgccccctagcagagatgagctgaccaagaaccaggtgtccctgacctgcctggtgaagggcttctaccccagcgacatcgccgtggagtgggagagcaacggccagcccgagaacaactacaagaccaccccccctgtgctggacagcgatggcagcttcttcctgtacagcaagctgaccgtggacaagagcagatggcagcagggcaacgtgttcagctgcagcgtgatgcacgaggccctgcacaatcactacacccagaagagcctgagcctgtcccctggcaagtga

SEQ ID NO: 388 - DNA, 1026 bp, Artificial Sequence
  Synthetic
gacatccagatgacccagagccccagcagcctgagcgcctctgtgggcgatagagtgaccatcacctgcagagccagccaggccatcgacagctacctgcactggtatcagcagaagcctggcaaggccagcaagctgctgatctacagcgccagcaatctggagaccggcgtgcctagcagattcagcggcagcggctccggcaccgacttcaccctgaccatcagcagcctgctgcctgaggatttcgccacctactactgccagcaggtggtgtggagacctttcaccttcggccagggcaccaaggtggagatcaagcgggtggagcccaagagcagcgataagacccacacctgccccccctgccctgcccccgagctgctgggcggacccagcgtgttcctgttcccccccaagcctaaggacaccctgatgatcagcagaacccccgaggtgacctgcgtggtggtggatgtgagccacgaggaccctgaggtgaagttcaactggtacgtggacggcgtggaggtgcacaatgccaagaccaagcccagggaggagcagtacaacagcacctaccgggtggtgtccgtgctgaccgtgctgcaccaggattggctgaacggcaaggagtacaagtgcaaggtgtccaacaaggccctgcctgcccctatcgagaaaaccatcagcaaggccaagggccagcccagagagccccaggtgtacaccctgccccctagcagagatgagctgaccaagaaccaggtgtccctgacctgcctggtgaagggcttctaccccagcgacatcgccgtggagtgggagagcaacggccagcccgagaacaactacaagaccaccccccctgtgctggacagcgatggcagcttcttcctgtacagcaagctgaccgtggacaagagcagatggcagcagggcaacgtgttcagctgcagcgtgatgcacgaggccctgcacaatcactacacccagaagagcctgagcctgtcccctggcaagtga

SEQ ID NO: 389 - DNA, 1026 bp, Artificial Sequence
  Synthetic
gacatccagatgacccagagccccagcagcctgagcgcctctgtgggcgatagagtgaccatcacctgcagagccagccaggccatcgacagctacctgcactggtatcagcagaagcctggcaaggccctgaagctgctgatctacagcgccagcaatctggagaccggcgtgcctagcagattcagcggcagcggctccggcaccgacttcaccctgaccatcagcagcctgctgcctgaggatttcgccacctactactgccagcaggtggtgtggagacctttcaccttcggccagggcaccaaggtggagatcaagcgggtggagcccaagagcagcgataagacccacacctgccccccctgccctgcccccgagctgctgggcggacccagcgtgttcctgttcccccccaagcctaaggacaccctgatgatcagcagaacccccgaggtgacctgcgtggtggtggatgtgagccacgaggaccctgaggtgaagttcaactggtacgtggacggcgtggaggtgcacaatgccaagaccaagcccagggaggagcagtacaacagcacctaccgggtggtgtccgtgctgaccgtgctgcaccaggattggctgaacggcaaggagtacaagtgcaaggtgtccaacaaggccctgcctgcccctatcgagaaaaccatcagcaaggccaagggccagcccagagagccccaggtgtacaccctgccccctagcagagatgagctgaccaagaaccaggtgtccctgacctgcctggtgaagggcttctaccccagcgacatcgccgtggagtgggagagcaacggccagcccgagaacaactacaagaccaccccccctgtgctggacagcgatggcagcttcttcctgtacagcaagctgaccgtggacaagagcagatggcagcagggcaacgtgttcagctgcagcgtgatgcacgaggccctgcacaatcactacacccagaagagcctgagcctgtcccctggcaagtga

SEQ ID NO: 390 - DNA, 1026 bp, Artificial Sequence
  Synthetic
gacatccagatgacccagagccccagcagcctgagcgcctctgtgggcgatagagtgaccatcacctgcagagccagccaggccatcgacagctacctgcactggtatcagcagaagcctggcaaggcctacaagctgctgatctacagcgccagcaatctggagaccggcgtgcctagcagattcagcggcagcggctccggcaccgacttcaccctgaccatcagcagcctgctgcctgaggatttcgccacctactactgccagcaggtggtgtggagacctttcaccttcggccagggcaccaaggtggagatcaagcgggtggagcccaagagcagcgataagacccacacctgccccccctgccctgcccccgagctgctgggcggacccagcgtgttcctgttcccccccaagcctaaggacaccctgatgatcagcagaacccccgaggtgacctgcgtggtggtggatgtgagccacgaggaccctgaggtgaagttcaactggtacgtggacggcgtggaggtgcacaatgccaagaccaagcccagggaggagcagtacaacagcacctaccgggtggtgtccgtgctgaccgtgctgcaccaggattggctgaacggcaaggagtacaagtgcaaggtgtccaacaaggccctgcctgcccctatcgagaaaaccatcagcaaggccaagggccagcccagagagccccaggtgtacaccctgccccctagcagagatgagctgaccaagaaccaggtgtccctgacctgcctggtgaagggcttctaccccagcgacatcgccgtggagtgggagagcaacggccagcccgagaacaactacaagaccaccccccctgtgctggacagcgatggcagcttcttcctgtacagcaagctgaccgtggacaagagcagatggcagcagggcaacgtgttcagctgcagcgtgatgcacgaggccctgcacaatcactacacccagaagagcctgagcctgtcccctggcaagtga

SEQ ID NO: 391 - DNA, 1026 bp, Artificial Sequence
  Synthetic
gacatccagatgacccagagccccagcagcctgagcgcctctgtgggcgatagagtgaccatcacctgcagagccagccaggccatcgacagctacctgcactggtatcagcagaagcctggcaaggccgacaagctgctgatctacagcgccagcaatctggagaccggcgtgcctagcagattcagcggcagcggctccggcaccgacttcaccctgaccatcagcagcctgctgcctgaggatttcgccacctactactgccagcaggtggtgtggagacctttcaccttcggccagggcaccaaggtggagatcaagcgggtggagcccaagagcagcgataagacccacacctgccccccctgccctgcccccgagctgctgggcggacccagcgtgttcctgttcccccccaagcctaaggacaccctgatgatcagcagaacccccgaggtgacctgcgtggtggtggatgtgagccacgaggaccctgaggtgaagttcaactggtacgtggacggcgtggaggtgcacaatgccaagaccaagcccagggaggagcagtacaacagcacctaccgggtggtgtccgtgctgaccgtgctgcaccaggattggctgaacggcaaggagtacaagtgcaaggtgtccaacaaggccctgcctgcccctatcgagaaaaccatcagcaaggccaagggccagcccagagagccccaggtgtacaccctgccccctagcagagatgagctgaccaagaaccaggtgtccctgacctgcctggtgaagggcttctaccccagcgacatcgccgtggagtgggagagcaacggccagcccgagaacaactacaagaccaccccccctgtgctggacagcgatggcagcttcttcctgtacagcaagctgaccgtggacaagagcagatggcagcagggcaacgtgttcagctgcagcgtgatgcacgaggccctgcacaatcactacacccagaagagcctgagcctgtcccctggcaagtga

SEQ ID NO: 392 - DNA, 1026 bp, Artificial Sequence
  Synthetic
gacatccagatgacccagagccccagcagcctgagcgcctctgtgggcgatagagtgaccatcacctgcagagccagccaggccatcgacagctacctgcactggtatcagcagaagcctggcaaggcccagaagctgctgatctacagcgccagcaatctggagaccggcgtgcctagcagattcagcggcagcggctccggcaccgacttcaccctgaccatcagcagcctgctgcctgaggatttcgccacctactactgccagcaggtggtgtggagacctttcaccttcggccagggcaccaaggtggagatcaagcgggtggagcccaagagcagcgataagacccacacctgccccccctgccctgcccccgagctgctgggcggacccagcgtgttcctgttcccccccaagcctaaggacaccctgatgatcagcagaacccccgaggtgacctgcgtggtggtggatgtgagccacgaggaccctgaggtgaagttcaactggtacgtggacggcgtggaggtgcacaatgccaagaccaagcccagggaggagcagtacaacagcacctaccgggtggtgtccgtgctgaccgtgctgcaccaggattggctgaacggcaaggagtacaagtgcaaggtgtccaacaaggccctgcctgcccctatcgagaaaaccatcagcaaggccaagggccagcccagagagccccaggtgtacaccctgccccctagcagagatgagctgaccaagaaccaggtgtccctgacctgcctggtgaagggcttctaccccagcgacatcgccgtggagtgggagagcaacggccagcccgagaacaactacaagaccaccccccctgtgctggacagcgatggcagcttcttcctgtacagcaagctgaccgtggacaagagcagatggcagcagggcaacgtgttcagctgcagcgtgatgcacgaggccctgcacaatcactacacccagaagagcctgagcctgtcccctggcaagtga

SEQ ID NO: 393 - DNA, 1026 bp, Artificial Sequence
  Synthetic
gacatccagatgacccagagccccagcagcctgagcgcctctgtgggcgatagagtgaccatcacctgcagagccagccaggccatcgacagctacctgcactggtatcagcagaagcctggcaaggcccacaagctgctgatctacagcgccagcaatctggagaccggcgtgcctagcagattcagcggcagcggctccggcaccgacttcaccctgaccatcagcagcctgctgcctgaggatttcgccacctactactgccagcaggtggtgtggagacctttcaccttcggccagggcaccaaggtggagatcaagcgggtggagcccaagagcagcgataagacccacacctgccccccctgccctgcccccgagctgctgggcggacccagcgtgttcctgttcccccccaagcctaaggacaccctgatgatcagcagaacccccgaggtgacctgcgtggtggtggatgtgagccacgaggaccctgaggtgaagttcaactggtacgtggacggcgtggaggtgcacaatgccaagaccaagcccagggaggagcagtacaacagcacctaccgggtggtgtccgtgctgaccgtgctgcaccaggattggctgaacggcaaggagtacaagtgcaaggtgtccaacaaggccctgcctgcccctatcgagaaaaccatcagcaaggccaagggccagcccagagagccccaggtgtacaccctgccccctagcagagatgagctgaccaagaaccaggtgtccctgacctgcctggtgaagggcttctaccccagcgacatcgccgtggagtgggagagcaacggccagcccgagaacaactacaagaccaccccccctgtgctggacagcgatggcagcttcttcctgtacagcaagctgaccgtggacaagagcagatggcagcagggcaacgtgttcagctgcagcgtgatgcacgaggccctgcacaatcactacacccagaagagcctgagcctgtcccctggcaagtga

SEQ ID NO: 394 - DNA, 1026 bp, Artificial Sequence
  Synthetic
gacatccagatgacccagagccccagcagcctgagcgcctctgtgggcgatagagtgaccatcacctgcagagccagccaggccatcgacagctacctgcactggtatcagcagaagcctggcaaggccaagaagctgctgatctacagcgccagcaatctggagaccggcgtgcctagcagattcagcggcagcggctccggcaccgacttcaccctgaccatcagcagcctgctgcctgaggatttcgccacctactactgccagcaggtggtgtggagacctttcaccttcggccagggcaccaaggtggagatcaagcgggtggagcccaagagcagcgataagacccacacctgccccccctgccctgcccccgagctgctgggcggacccagcgtgttcctgttcccccccaagcctaaggacaccctgatgatcagcagaacccccgaggtgacctgcgtggtggtggatgtgagccacgaggaccctgaggtgaagttcaactggtacgtggacggcgtggaggtgcacaatgccaagaccaagcccagggaggagcagtacaacagcacctaccgggtggtgtccgtgctgaccgtgctgcaccaggattggctgaacggcaaggagtacaagtgcaaggtgtccaacaaggccctgcctgcccctatcgagaaaaccatcagcaaggccaagggccagcccagagagccccaggtgtacaccctgccccctagcagagatgagctgaccaagaaccaggtgtccctgacctgcctggtgaagggcttctaccccagcgacatcgccgtggagtgggagagcaacggccagcccgagaacaactacaagaccaccccccctgtgctggacagcgatggcagcttcttcctgtacagcaagctgaccgtggacaagagcagatggcagcagggcaacgtgttcagctgcagcgtgatgcacgaggccctgcacaatcactacacccagaagagcctgagcctgtcccctggcaagtga

SEQ ID NO: 395 - DNA, 1026 bp, Artificial Sequence
  Synthetic
gacatccagatgacccagagccccagcagcctgagcgcctctgtgggcgatagagtgaccatcacctgcagagccagccaggccatcgacagctacctgcactggtatcagcagaagcctggcaaggcccctaagctgctgatctacagcgccagcaatctggagaccggcgtgcctagcagaagcagcggcagcggctccggcaccgacttcaccctgaccatcagcagcctgctgcctgaggatttcgccacctactactgccagcaggtggtgtggagacctttcaccttcggccagggcaccaaggtggagatcaagcgggtggagcccaagagcagcgataagacccacacctgccccccctgccctgcccccgagctgctgggcggacccagcgtgttcctgttcccccccaagcctaaggacaccctgatgatcagcagaacccccgaggtgacctgcgtggtggtggatgtgagccacgaggaccctgaggtgaagttcaactggtacgtggacggcgtggaggtgcacaatgccaagaccaagcccagggaggagcagtacaacagcacctaccgggtggtgtccgtgctgaccgtgctgcaccaggattggctgaacggcaaggagtacaagtgcaaggtgtccaacaaggccctgcctgcccctatcgagaaaaccatcagcaaggccaagggccagcccagagagccccaggtgtacaccctgccccctagcagagatgagctgaccaagaaccaggtgtccctgacctgcctggtgaagggcttctaccccagcgacatcgccgtggagtgggagagcaacggccagcccgagaacaactacaagaccaccccccctgtgctggacagcgatggcagcttcttcctgtacagcaagctgaccgtggacaagagcagatggcagcagggcaacgtgttcagctgcagcgtgatgcacgaggccctgcacaatcactacacccagaagagcctgagcctgtcccctggcaagtga

SEQ ID NO: 396 - DNA, 1026 bp, Artificial Sequence
  Synthetic
gacatccagatgacccagagccccagcagcctgagcgcctctgtgggcgatagagtgaccatcacctgcagagccagccaggccatcgacagctacctgcactggtatcagcagaagcctggcaaggcccctaagctgctgatctacagcgccagcaatctggagaccggcgtgcctagcagactgagcggcagcggctccggcaccgacttcaccctgaccatcagcagcctgctgcctgaggatttcgccacctactactgccagcaggtggtgtggagacctttcaccttcggccagggcaccaaggtggagatcaagcgggtggagcccaagagcagcgataagacccacacctgccccccctgccctgcccccgagctgctgggcggacccagcgtgttcctgttcccccccaagcctaaggacaccctgatgatcagcagaacccccgaggtgacctgcgtggtggtggatgtgagccacgaggaccctgaggtgaagttcaactggtacgtggacggcgtggaggtgcacaatgccaagaccaagcccagggaggagcagtacaacagcacctaccgggtggtgtccgtgctgaccgtgctgcaccaggattggctgaacggcaaggagtacaagtgcaaggtgtccaacaaggccctgcctgcccctatcgagaaaaccatcagcaaggccaagggccagcccagagagccccaggtgtacaccctgccccctagcagagatgagctgaccaagaaccaggtgtccctgacctgcctggtgaagggcttctaccccagcgacatcgccgtggagtgggagagcaacggccagcccgagaacaactacaagaccaccccccctgtgctggacagcgatggcagcttcttcctgtacagcaagctgaccgtggacaagagcagatggcagcagggcaacgtgttcagctgcagcgtgatgcacgaggccctgcacaatcactacacccagaagagcctgagcctgtcccctggcaagtga

SEQ ID NO: 397 - DNA, 1026 bp, Artificial Sequence
  Synthetic
gacatccagatgacccagagccccagcagcctgagcgcctctgtgggcgatagagtgaccatcacctgcagagccagccaggccatcgacagctacctgcactggtatcagcagaagcctggcaaggcccctaagctgctgatctacagcgccagcaatctggagaccggcgtgcctagcagatacagcggcagcggctccggcaccgacttcaccctgaccatcagcagcctgctgcctgaggatttcgccacctactactgccagcaggtggtgtggagacctttcaccttcggccagggcaccaaggtggagatcaagcgggtggagcccaagagcagcgataagacccacacctgccccccctgccctgcccccgagctgctgggcggacccagcgtgttcctgttcccccccaagcctaaggacaccctgatgatcagcagaacccccgaggtgacctgcgtggtggtggatgtgagccacgaggaccctgaggtgaagttcaactggtacgtggacggcgtggaggtgcacaatgccaagaccaagcccagggaggagcagtacaacagcacctaccgggtggtgtccgtgctgaccgtgctgcaccaggattggctgaacggcaaggagtacaagtgcaaggtgtccaacaaggccctgcctgcccctatcgagaaaaccatcagcaaggccaagggccagcccagagagccccaggtgtacaccctgccccctagcagagatgagctgaccaagaaccaggtgtccctgacctgcctggtgaagggcttctaccccagcgacatcgccgtggagtgggagagcaacggccagcccgagaacaactacaagaccaccccccctgtgctggacagcgatggcagcttcttcctgtacagcaagctgaccgtggacaagagcagatggcagcagggcaacgtgttcagctgcagcgtgatgcacgaggccctgcacaatcactacacccagaagagcctgagcctgtcccctggcaagtga

SEQ ID NO: 398 - DNA, 1026 bp, Artificial Sequence
  Synthetic
gacatccagatgacccagagccccagcagcctgagcgcctctgtgggcgatagagtgaccatcacctgcagagccagccaggccatcgacagctacctgcactggtatcagcagaagcctggcaaggcccctaagctgctgatctacagcgccagcaatctggagaccggcgtgcctagcagagacagcggcagcggctccggcaccgacttcaccctgaccatcagcagcctgctgcctgaggatttcgccacctactactgccagcaggtggtgtggagacctttcaccttcggccagggcaccaaggtggagatcaagcgggtggagcccaagagcagcgataagacccacacctgccccccctgccctgcccccgagctgctgggcggacccagcgtgttcctgttcccccccaagcctaaggacaccctgatgatcagcagaacccccgaggtgacctgcgtggtggtggatgtgagccacgaggaccctgaggtgaagttcaactggtacgtggacggcgtggaggtgcacaatgccaagaccaagcccagggaggagcagtacaacagcacctaccgggtggtgtccgtgctgaccgtgctgcaccaggattggctgaacggcaaggagtacaagtgcaaggtgtccaacaaggccctgcctgcccctatcgagaaaaccatcagcaaggccaagggccagcccagagagccccaggtgtacaccctgccccctagcagagatgagctgaccaagaaccaggtgtccctgacctgcctggtgaagggcttctaccccagcgacatcgccgtggagtgggagagcaacggccagcccgagaacaactacaagaccaccccccctgtgctggacagcgatggcagcttcttcctgtacagcaagctgaccgtggacaagagcagatggcagcagggcaacgtgttcagctgcagcgtgatgcacgaggccctgcacaatcactacacccagaagagcctgagcctgtcccctggcaagtga

SEQ ID NO: 399 - DNA, 1026 bp, Artificial Sequence
  Synthetic
gacatccagatgacccagagccccagcagcctgagcgcctctgtgggcgatagagtgaccatcacctgcagagccagccaggccatcgacagctacctgcactggtatcagcagaagcctggcaaggcccctaagctgctgatctacagcgccagcaatctggagaccggcgtgcctagcagacagagcggcagcggctccggcaccgacttcaccctgaccatcagcagcctgctgcctgaggatttcgccacctactactgccagcaggtggtgtggagacctttcaccttcggccagggcaccaaggtggagatcaagcgggtggagcccaagagcagcgataagacccacacctgccccccctgccctgcccccgagctgctgggcggacccagcgtgttcctgttcccccccaagcctaaggacaccctgatgatcagcagaacccccgaggtgacctgcgtggtggtggatgtgagccacgaggaccctgaggtgaagttcaactggtacgtggacggcgtggaggtgcacaatgccaagaccaagcccagggaggagcagtacaacagcacctaccgggtggtgtccgtgctgaccgtgctgcaccaggattggctgaacggcaaggagtacaagtgcaaggtgtccaacaaggccctgcctgcccctatcgagaaaaccatcagcaaggccaagggccagcccagagagccccaggtgtacaccctgccccctagcagagatgagctgaccaagaaccaggtgtccctgacctgcctggtgaagggcttctaccccagcgacatcgccgtggagtgggagagcaacggccagcccgagaacaactacaagaccaccccccctgtgctggacagcgatggcagcttcttcctgtacagcaagctgaccgtggacaagagcagatggcagcagggcaacgtgttcagctgcagcgtgatgcacgaggccctgcacaatcactacacccagaagagcctgagcctgtcccctggcaagtga

SEQ ID NO: 400 - DNA, 1026 bp, Artificial Sequence
  Synthetic
gacatccagatgacccagagccccagcagcctgagcgcctctgtgggcgatagagtgaccatcacctgcagagccagccaggccatcgacagctacctgcactggtatcagcagaagcctggcaaggcccctaagctgctgatctacagcgccagcaatctggagaccggcgtgcctagcagacacagcggcagcggctccggcaccgacttcaccctgaccatcagcagcctgctgcctgaggatttcgccacctactactgccagcaggtggtgtggagacctttcaccttcggccagggcaccaaggtggagatcaagcgggtggagcccaagagcagcgataagacccacacctgccccccctgccctgcccccgagctgctgggcggacccagcgtgttcctgttcccccccaagcctaaggacaccctgatgatcagcagaacccccgaggtgacctgcgtggtggtggatgtgagccacgaggaccctgaggtgaagttcaactggtacgtggacggcgtggaggtgcacaatgccaagaccaagcccagggaggagcagtacaacagcacctaccgggtggtgtccgtgctgaccgtgctgcaccaggattggctgaacggcaaggagtacaagtgcaaggtgtccaacaaggccctgcctgcccctatcgagaaaaccatcagcaaggccaagggccagcccagagagccccaggtgtacaccctgccccctagcagagatgagctgaccaagaaccaggtgtccctgacctgcctggtgaagggcttctaccccagcgacatcgccgtggagtgggagagcaacggccagcccgagaacaactacaagaccaccccccctgtgctggacagcgatggcagcttcttcctgtacagcaagctgaccgtggacaagagcagatggcagcagggcaacgtgttcagctgcagcgtgatgcacgaggccctgcacaatcactacacccagaagagcctgagcctgtcccctggcaagtga

SEQ ID NO: 401 - DNA, 1026 bp, Artificial Sequence
  Synthetic
gacatccagatgacccagagccccagcagcctgagcgcctctgtgggcgatagagtgaccatcacctgcagagccagccaggccatcgacagctacctgcactggtatcagcagaagcctggcaaggcccctaagctgctgatctacagcgccagcaatctggagaccggcgtgcctagcagacccagcggcagcggctccggcaccgacttcaccctgaccatcagcagcctgctgcctgaggatttcgccacctactactgccagcaggtggtgtggagacctttcaccttcggccagggcaccaaggtggagatcaagcgggtggagcccaagagcagcgataagacccacacctgccccccctgccctgcccccgagctgctgggcggacccagcgtgttcctgttcccccccaagcctaaggacaccctgatgatcagcagaacccccgaggtgacctgcgtggtggtggatgtgagccacgaggaccctgaggtgaagttcaactggtacgtggacggcgtggaggtgcacaatgccaagaccaagcccagggaggagcagtacaacagcacctaccgggtggtgtccgtgctgaccgtgctgcaccaggattggctgaacggcaaggagtacaagtgcaaggtgtccaacaaggccctgcctgcccctatcgagaaaaccatcagcaaggccaagggccagcccagagagccccaggtgtacaccctgccccctagcagagatgagctgaccaagaaccaggtgtccctgacctgcctggtgaagggcttctaccccagcgacatcgccgtggagtgggagagcaacggccagcccgagaacaactacaagaccaccccccctgtgctggacagcgatggcagcttcttcctgtacagcaagctgaccgtggacaagagcagatggcagcagggcaacgtgttcagctgcagcgtgatgcacgaggccctgcacaatcactacacccagaagagcctgagcctgtcccctggcaagtga

SEQ ID NO: 402 - DNA, 1026 bp, Artificial Sequence
  Synthetic
gacatccagatgacccagagccccagcagcctgagcgcctctgtgggcgatagagtgaccatcacctgcagagccagccaggccatcgacagctacctgcactggtatcagcagaagcctggcaaggcccctaagctgctgatctacagcgccagcaatctggagaccggcgtgcctagcagaaagagcggcagcggctccggcaccgacttcaccctgaccatcagcagcctgctgcctgaggatttcgccacctactactgccagcaggtggtgtggagacctttcaccttcggccagggcaccaaggtggagatcaagcgggtggagcccaagagcagcgataagacccacacctgccccccctgccctgcccccgagctgctgggcggacccagcgtgttcctgttcccccccaagcctaaggacaccctgatgatcagcagaacccccgaggtgacctgcgtggtggtggatgtgagccacgaggaccctgaggtgaagttcaactggtacgtggacggcgtggaggtgcacaatgccaagaccaagcccagggaggagcagtacaacagcacctaccgggtggtgtccgtgctgaccgtgctgcaccaggattggctgaacggcaaggagtacaagtgcaaggtgtccaacaaggccctgcctgcccctatcgagaaaaccatcagcaaggccaagggccagcccagagagccccaggtgtacaccctgccccctagcagagatgagctgaccaagaaccaggtgtccctgacctgcctggtgaagggcttctaccccagcgacatcgccgtggagtgggagagcaacggccagcccgagaacaactacaagaccaccccccctgtgctggacagcgatggcagcttcttcctgtacagcaagctgaccgtggacaagagcagatggcagcagggcaacgtgttcagctgcagcgtgatgcacgaggccctgcacaatcactacacccagaagagcctgagcctgtcccctggcaagtga

SEQ ID NO: 403 - DNA, 1026 bp, Artificial Sequence
  Synthetic
gacatccagatgacccagagccccagcagcctgagcgcctctgtgggcgatagagtgaccatcacctgcagagccagccaggccatcgacagctacctgcactggtatcagcagaagcctggcaaggcccctaagctgctgatctacagcgccagcaatctggagaccggcgtgcctagcagattcctgggcagcggctccggcaccgacttcaccctgaccatcagcagcctgctgcctgaggatttcgccacctactactgccagcaggtggtgtggagacctttcaccttcggccagggcaccaaggtggagatcaagcgggtggagcccaagagcagcgataagacccacacctgccccccctgccctgcccccgagctgctgggcggacccagcgtgttcctgttcccccccaagcctaaggacaccctgatgatcagcagaacccccgaggtgacctgcgtggtggtggatgtgagccacgaggaccctgaggtgaagttcaactggtacgtggacggcgtggaggtgcacaatgccaagaccaagcccagggaggagcagtacaacagcacctaccgggtggtgtccgtgctgaccgtgctgcaccaggattggctgaacggcaaggagtacaagtgcaaggtgtccaacaaggccctgcctgcccctatcgagaaaaccatcagcaaggccaagggccagcccagagagccccaggtgtacaccctgccccctagcagagatgagctgaccaagaaccaggtgtccctgacctgcctggtgaagggcttctaccccagcgacatcgccgtggagtgggagagcaacggccagcccgagaacaactacaagaccaccccccctgtgctggacagcgatggcagcttcttcctgtacagcaagctgaccgtggacaagagcagatggcagcagggcaacgtgttcagctgcagcgtgatgcacgaggccctgcacaatcactacacccagaagagcctgagcctgtcccctggcaagtga

SEQ ID NO: 404 - DNA, 1026 bp, Artificial Sequence
  Synthetic
gacatccagatgacccagagccccagcagcctgagcgcctctgtgggcgatagagtgaccatcacctgcagagccagccaggccatcgacagctacctgcactggtatcagcagaagcctggcaaggcccctaagctgctgatctacagcgccagcaatctggagaccggcgtgcctagcagattcgacggcagcggctccggcaccgacttcaccctgaccatcagcagcctgctgcctgaggatttcgccacctactactgccagcaggtggtgtggagacctttcaccttcggccagggcaccaaggtggagatcaagcgggtggagcccaagagcagcgataagacccacacctgccccccctgccctgcccccgagctgctgggcggacccagcgtgttcctgttcccccccaagcctaaggacaccctgatgatcagcagaacccccgaggtgacctgcgtggtggtggatgtgagccacgaggaccctgaggtgaagttcaactggtacgtggacggcgtggaggtgcacaatgccaagaccaagcccagggaggagcagtacaacagcacctaccgggtggtgtccgtgctgaccgtgctgcaccaggattggctgaacggcaaggagtacaagtgcaaggtgtccaacaaggccctgcctgcccctatcgagaaaaccatcagcaaggccaagggccagcccagagagccccaggtgtacaccctgccccctagcagagatgagctgaccaagaaccaggtgtccctgacctgcctggtgaagggcttctaccccagcgacatcgccgtggagtgggagagcaacggccagcccgagaacaactacaagaccaccccccctgtgctggacagcgatggcagcttcttcctgtacagcaagctgaccgtggacaagagcagatggcagcagggcaacgtgttcagctgcagcgtgatgcacgaggccctgcacaatcactacacccagaagagcctgagcctgtcccctggcaagtga

SEQ ID NO: 405 - DNA, 1026 bp, Artificial Sequence
  Synthetic
gacatccagatgacccagagccccagcagcctgagcgcctctgtgggcgatagagtgaccatcacctgcagagccagccaggccatcgacagctacctgcactggtatcagcagaagcctggcaaggcccctaagctgctgatctacagcgccagcaatctggagaccggcgtgcctagcagattccagggcagcggctccggcaccgacttcaccctgaccatcagcagcctgctgcctgaggatttcgccacctactactgccagcaggtggtgtggagacctttcaccttcggccagggcaccaaggtggagatcaagcgggtggagcccaagagcagcgataagacccacacctgccccccctgccctgcccccgagctgctgggcggacccagcgtgttcctgttcccccccaagcctaaggacaccctgatgatcagcagaacccccgaggtgacctgcgtggtggtggatgtgagccacgaggaccctgaggtgaagttcaactggtacgtggacggcgtggaggtgcacaatgccaagaccaagcccagggaggagcagtacaacagcacctaccgggtggtgtccgtgctgaccgtgctgcaccaggattggctgaacggcaaggagtacaagtgcaaggtgtccaacaaggccctgcctgcccctatcgagaaaaccatcagcaaggccaagggccagcccagagagccccaggtgtacaccctgccccctagcagagatgagctgaccaagaaccaggtgtccctgacctgcctggtgaagggcttctaccccagcgacatcgccgtggagtgggagagcaacggccagcccgagaacaactacaagaccaccccccctgtgctggacagcgatggcagcttcttcctgtacagcaagctgaccgtggacaagagcagatggcagcagggcaacgtgttcagctgcagcgtgatgcacgaggccctgcacaatcactacacccagaagagcctgagcctgtcccctggcaagtga

SEQ ID NO: 406 - DNA, 1026 bp, Artificial Sequence
  Synthetic
gacatccagatgacccagagccccagcagcctgagcgcctctgtgggcgatagagtgaccatcacctgcagagccagccaggccatcgacagctacctgcactggtatcagcagaagcctggcaaggcccctaagctgctgatctacagcgccagcaatctggagaccggcgtgcctagcagattccacggcagcggctccggcaccgacttcaccctgaccatcagcagcctgctgcctgaggatttcgccacctactactgccagcaggtggtgtggagacctttcaccttcggccagggcaccaaggtggagatcaagcgggtggagcccaagagcagcgataagacccacacctgccccccctgccctgcccccgagctgctgggcggacccagcgtgttcctgttcccccccaagcctaaggacaccctgatgatcagcagaacccccgaggtgacctgcgtggtggtggatgtgagccacgaggaccctgaggtgaagttcaactggtacgtggacggcgtggaggtgcacaatgccaagaccaagcccagggaggagcagtacaacagcacctaccgggtggtgtccgtgctgaccgtgctgcaccaggattggctgaacggcaaggagtacaagtgcaaggtgtccaacaaggccctgcctgcccctatcgagaaaaccatcagcaaggccaagggccagcccagagagccccaggtgtacaccctgccccctagcagagatgagctgaccaagaaccaggtgtccctgacctgcctggtgaagggcttctaccccagcgacatcgccgtggagtgggagagcaacggccagcccgagaacaactacaagaccaccccccctgtgctggacagcgatggcagcttcttcctgtacagcaagctgaccgtggacaagagcagatggcagcagggcaacgtgttcagctgcagcgtgatgcacgaggccctgcacaatcactacacccagaagagcctgagcctgtcccctggcaagtga

SEQ ID NO: 407 - DNA, 1026 bp, Artificial Sequence
  Synthetic
gacatccagatgacccagagccccagcagcctgagcgcctctgtgggcgatagagtgaccatcacctgcagagccagccaggccatcgacagctacctgcactggtatcagcagaagcctggcaaggcccctaagctgctgatctacagcgccagcaatctggagaccggcgtgcctagcagattccccggcagcggctccggcaccgacttcaccctgaccatcagcagcctgctgcctgaggatttcgccacctactactgccagcaggtggtgtggagacctttcaccttcggccagggcaccaaggtggagatcaagcgggtggagcccaagagcagcgataagacccacacctgccccccctgccctgcccccgagctgctgggcggacccagcgtgttcctgttcccccccaagcctaaggacaccctgatgatcagcagaacccccgaggtgacctgcgtggtggtggatgtgagccacgaggaccctgaggtgaagttcaactggtacgtggacggcgtggaggtgcacaatgccaagaccaagcccagggaggagcagtacaacagcacctaccgggtggtgtccgtgctgaccgtgctgcaccaggattggctgaacggcaaggagtacaagtgcaaggtgtccaacaaggccctgcctgcccctatcgagaaaaccatcagcaaggccaagggccagcccagagagccccaggtgtacaccctgccccctagcagagatgagctgaccaagaaccaggtgtccctgacctgcctggtgaagggcttctaccccagcgacatcgccgtggagtgggagagcaacggccagcccgagaacaactacaagaccaccccccctgtgctggacagcgatggcagcttcttcctgtacagcaagctgaccgtggacaagagcagatggcagcagggcaacgtgttcagctgcagcgtgatgcacgaggccctgcacaatcactacacccagaagagcctgagcctgtcccctggcaagtga

SEQ ID NO: 408 - DNA, 1026 bp, Artificial Sequence
  Synthetic
gacatccagatgacccagagccccagcagcctgagcgcctctgtgggcgatagagtgaccatcacctgcagagccagccaggccatcgacagctacctgcactggtatcagcagaagcctggcaaggcccctaagctgctgatctacagcgccagcaatctggagaccggcgtgcctagcagattcaagggcagcggctccggcaccgacttcaccctgaccatcagcagcctgctgcctgaggatttcgccacctactactgccagcaggtggtgtggagacctttcaccttcggccagggcaccaaggtggagatcaagcgggtggagcccaagagcagcgataagacccacacctgccccccctgccctgcccccgagctgctgggcggacccagcgtgttcctgttcccccccaagcctaaggacaccctgatgatcagcagaacccccgaggtgacctgcgtggtggtggatgtgagccacgaggaccctgaggtgaagttcaactggtacgtggacggcgtggaggtgcacaatgccaagaccaagcccagggaggagcagtacaacagcacctaccgggtggtgtccgtgctgaccgtgctgcaccaggattggctgaacggcaaggagtacaagtgcaaggtgtccaacaaggccctgcctgcccctatcgagaaaaccatcagcaaggccaagggccagcccagagagccccaggtgtacaccctgccccctagcagagatgagctgaccaagaaccaggtgtccctgacctgcctggtgaagggcttctaccccagcgacatcgccgtggagtgggagagcaacggccagcccgagaacaactacaagaccaccccccctgtgctggacagcgatggcagcttcttcctgtacagcaagctgaccgtggacaagagcagatggcagcagggcaacgtgttcagctgcagcgtgatgcacgaggccctgcacaatcactacacccagaagagcctgagcctgtcccctggcaagtga

SEQ ID NO: 409 - DNA, 1026 bp, Artificial Sequence
  Synthetic
gacatccagatgacccagagccccagcagcctgagcgcctctgtgggcgatagagtgaccatcacctgcagagccagccaggccatcgacagctacctgcactggtatcagcagaagcctggcaaggcccctaagctgctgatctacagcgccagcaatctggagaccggcgtgcctagcagattcagcagcagcggctccggcaccgacttcaccctgaccatcagcagcctgctgcctgaggatttcgccacctactactgccagcaggtggtgtggagacctttcaccttcggccagggcaccaaggtggagatcaagcgggtggagcccaagagcagcgataagacccacacctgccccccctgccctgcccccgagctgctgggcggacccagcgtgttcctgttcccccccaagcctaaggacaccctgatgatcagcagaacccccgaggtgacctgcgtggtggtggatgtgagccacgaggaccctgaggtgaagttcaactggtacgtggacggcgtggaggtgcacaatgccaagaccaagcccagggaggagcagtacaacagcacctaccgggtggtgtccgtgctgaccgtgctgcaccaggattggctgaacggcaaggagtacaagtgcaaggtgtccaacaaggccctgcctgcccctatcgagaaaaccatcagcaaggccaagggccagcccagagagccccaggtgtacaccctgccccctagcagagatgagctgaccaagaaccaggtgtccctgacctgcctggtgaagggcttctaccccagcgacatcgccgtggagtgggagagcaacggccagcccgagaacaactacaagaccaccccccctgtgctggacagcgatggcagcttcttcctgtacagcaagctgaccgtggacaagagcagatggcagcagggcaacgtgttcagctgcagcgtgatgcacgaggccctgcacaatcactacacccagaagagcctgagcctgtcccctggcaagtga

SEQ ID NO: 410 - DNA, 1026 bp, Artificial Sequence
  Synthetic
gacatccagatgacccagagccccagcagcctgagcgcctctgtgggcgatagagtgaccatcacctgcagagccagccaggccatcgacagctacctgcactggtatcagcagaagcctggcaaggcccctaagctgctgatctacagcgccagcaatctggagaccggcgtgcctagcagattcagcctgagcggctccggcaccgacttcaccctgaccatcagcagcctgctgcctgaggatttcgccacctactactgccagcaggtggtgtggagacctttcaccttcggccagggcaccaaggtggagatcaagcgggtggagcccaagagcagcgataagacccacacctgccccccctgccctgcccccgagctgctgggcggacccagcgtgttcctgttcccccccaagcctaaggacaccctgatgatcagcagaacccccgaggtgacctgcgtggtggtggatgtgagccacgaggaccctgaggtgaagttcaactggtacgtggacggcgtggaggtgcacaatgccaagaccaagcccagggaggagcagtacaacagcacctaccgggtggtgtccgtgctgaccgtgctgcaccaggattggctgaacggcaaggagtacaagtgcaaggtgtccaacaaggccctgcctgcccctatcgagaaaaccatcagcaaggccaagggccagcccagagagccccaggtgtacaccctgccccctagcagagatgagctgaccaagaaccaggtgtccctgacctgcctggtgaagggcttctaccccagcgacatcgccgtggagtgggagagcaacggccagcccgagaacaactacaagaccaccccccctgtgctggacagcgatggcagcttcttcctgtacagcaagctgaccgtggacaagagcagatggcagcagggcaacgtgttcagctgcagcgtgatgcacgaggccctgcacaatcactacacccagaagagcctgagcctgtcccctggcaagtga

SEQ ID NO: 411 - DNA, 1026 bp, Artificial Sequence
  Synthetic
gacatccagatgacccagagccccagcagcctgagcgcctctgtgggcgatagagtgaccatcacctgcagagccagccaggccatcgacagctacctgcactggtatcagcagaagcctggcaaggcccctaagctgctgatctacagcgccagcaatctggagaccggcgtgcctagcagattcagcgacagcggctccggcaccgacttcaccctgaccatcagcagcctgctgcctgaggatttcgccacctactactgccagcaggtggtgtggagacctttcaccttcggccagggcaccaaggtggagatcaagcgggtggagcccaagagcagcgataagacccacacctgccccccctgccctgcccccgagctgctgggcggacccagcgtgttcctgttcccccccaagcctaaggacaccctgatgatcagcagaacccccgaggtgacctgcgtggtggtggatgtgagccacgaggaccctgaggtgaagttcaactggtacgtggacggcgtggaggtgcacaatgccaagaccaagcccagggaggagcagtacaacagcacctaccgggtggtgtccgtgctgaccgtgctgcaccaggattggctgaacggcaaggagtacaagtgcaaggtgtccaacaaggccctgcctgcccctatcgagaaaaccatcagcaaggccaagggccagcccagagagccccaggtgtacaccctgccccctagcagagatgagctgaccaagaaccaggtgtccctgacctgcctggtgaagggcttctaccccagcgacatcgccgtggagtgggagagcaacggccagcccgagaacaactacaagaccaccccccctgtgctggacagcgatggcagcttcttcctgtacagcaagctgaccgtggacaagagcagatggcagcagggcaacgtgttcagctgcagcgtgatgcacgaggccctgcacaatcactacacccagaagagcctgagcctgtcccctggcaagtga

SEQ ID NO: 412 - DNA, 1026 bp, Artificial Sequence
  Synthetic
gacatccagatgacccagagccccagcagcctgagcgcctctgtgggcgatagagtgaccatcacctgcagagccagccaggccatcgacagctacctgcactggtatcagcagaagcctggcaaggcccctaagctgctgatctacagcgccagcaatctggagaccggcgtgcctagcagattcagccagagcggctccggcaccgacttcaccctgaccatcagcagcctgctgcctgaggatttcgccacctactactgccagcaggtggtgtggagacctttcaccttcggccagggcaccaaggtggagatcaagcgggtggagcccaagagcagcgataagacccacacctgccccccctgccctgcccccgagctgctgggcggacccagcgtgttcctgttcccccccaagcctaaggacaccctgatgatcagcagaacccccgaggtgacctgcgtggtggtggatgtgagccacgaggaccctgaggtgaagttcaactggtacgtggacggcgtggaggtgcacaatgccaagaccaagcccagggaggagcagtacaacagcacctaccgggtggtgtccgtgctgaccgtgctgcaccaggattggctgaacggcaaggagtacaagtgcaaggtgtccaacaaggccctgcctgcccctatcgagaaaaccatcagcaaggccaagggccagcccagagagccccaggtgtacaccctgccccctagcagagatgagctgaccaagaaccaggtgtccctgacctgcctggtgaagggcttctaccccagcgacatcgccgtggagtgggagagcaacggccagcccgagaacaactacaagaccaccccccctgtgctggacagcgatggcagcttcttcctgtacagcaagctgaccgtggacaagagcagatggcagcagggcaacgtgttcagctgcagcgtgatgcacgaggccctgcacaatcactacacccagaagagcctgagcctgtcccctggcaagtga

SEQ ID NO: 413 - DNA, 1026 bp, Artificial Sequence
  Synthetic
gacatccagatgacccagagccccagcagcctgagcgcctctgtgggcgatagagtgaccatcacctgcagagccagccaggccatcgacagctacctgcactggtatcagcagaagcctggcaaggcccctaagctgctgatctacagcgccagcaatctggagaccggcgtgcctagcagattcagccacagcggctccggcaccgacttcaccctgaccatcagcagcctgctgcctgaggatttcgccacctactactgccagcaggtggtgtggagacctttcaccttcggccagggcaccaaggtggagatcaagcgggtggagcccaagagcagcgataagacccacacctgccccccctgccctgcccccgagctgctgggcggacccagcgtgttcctgttcccccccaagcctaaggacaccctgatgatcagcagaacccccgaggtgacctgcgtggtggtggatgtgagccacgaggaccctgaggtgaagttcaactggtacgtggacggcgtggaggtgcacaatgccaagaccaagcccagggaggagcagtacaacagcacctaccgggtggtgtccgtgctgaccgtgctgcaccaggattggctgaacggcaaggagtacaagtgcaaggtgtccaacaaggccctgcctgcccctatcgagaaaaccatcagcaaggccaagggccagcccagagagccccaggtgtacaccctgccccctagcagagatgagctgaccaagaaccaggtgtccctgacctgcctggtgaagggcttctaccccagcgacatcgccgtggagtgggagagcaacggccagcccgagaacaactacaagaccaccccccctgtgctggacagcgatggcagcttcttcctgtacagcaagctgaccgtggacaagagcagatggcagcagggcaacgtgttcagctgcagcgtgatgcacgaggccctgcacaatcactacacccagaagagcctgagcctgtcccctggcaagtga

SEQ ID NO: 414 - DNA, 1026 bp, Artificial Sequence
  Synthetic
gacatccagatgacccagagccccagcagcctgagcgcctctgtgggcgatagagtgaccatcacctgcagagccagccaggccatcgacagctacctgcactggtatcagcagaagcctggcaaggcccctaagctgctgatctacagcgccagcaatctggagaccggcgtgcctagcagattcagccccagcggctccggcaccgacttcaccctgaccatcagcagcctgctgcctgaggatttcgccacctactactgccagcaggtggtgtggagacctttcaccttcggccagggcaccaaggtggagatcaagcgggtggagcccaagagcagcgataagacccacacctgccccccctgccctgcccccgagctgctgggcggacccagcgtgttcctgttcccccccaagcctaaggacaccctgatgatcagcagaacccccgaggtgacctgcgtggtggtggatgtgagccacgaggaccctgaggtgaagttcaactggtacgtggacggcgtggaggtgcacaatgccaagaccaagcccagggaggagcagtacaacagcacctaccgggtggtgtccgtgctgaccgtgctgcaccaggattggctgaacggcaaggagtacaagtgcaaggtgtccaacaaggccctgcctgcccctatcgagaaaaccatcagcaaggccaagggccagcccagagagccccaggtgtacaccctgccccctagcagagatgagctgaccaagaaccaggtgtccctgacctgcctggtgaagggcttctaccccagcgacatcgccgtggagtgggagagcaacggccagcccgagaacaactacaagaccaccccccctgtgctggacagcgatggcagcttcttcctgtacagcaagctgaccgtggacaagagcagatggcagcagggcaacgtgttcagctgcagcgtgatgcacgaggccctgcacaatcactacacccagaagagcctgagcctgtcccctggcaagtga

SEQ ID NO: 415 - DNA, 1026 bp, Artificial Sequence
  Synthetic
gacatccagatgacccagagccccagcagcctgagcgcctctgtgggcgatagagtgaccatcacctgcagagccagccaggccatcgacagctacctgcactggtatcagcagaagcctggcaaggcccctaagctgctgatctacagcgccagcaatctggagaccggcgtgcctagcagattcagcaagagcggctccggcaccgacttcaccctgaccatcagcagcctgctgcctgaggatttcgccacctactactgccagcaggtggtgtggagacctttcaccttcggccagggcaccaaggtggagatcaagcgggtggagcccaagagcagcgataagacccacacctgccccccctgccctgcccccgagctgctgggcggacccagcgtgttcctgttcccccccaagcctaaggacaccctgatgatcagcagaacccccgaggtgacctgcgtggtggtggatgtgagccacgaggaccctgaggtgaagttcaactggtacgtggacggcgtggaggtgcacaatgccaagaccaagcccagggaggagcagtacaacagcacctaccgggtggtgtccgtgctgaccgtgctgcaccaggattggctgaacggcaaggagtacaagtgcaaggtgtccaacaaggccctgcctgcccctatcgagaaaaccatcagcaaggccaagggccagcccagagagccccaggtgtacaccctgccccctagcagagatgagctgaccaagaaccaggtgtccctgacctgcctggtgaagggcttctaccccagcgacatcgccgtggagtgggagagcaacggccagcccgagaacaactacaagaccaccccccctgtgctggacagcgatggcagcttcttcctgtacagcaagctgaccgtggacaagagcagatggcagcagggcaacgtgttcagctgcagcgtgatgcacgaggccctgcacaatcactacacccagaagagcctgagcctgtcccctggcaagtga

SEQ ID NO: 416 - DNA, 1026 bp, Artificial Sequence
  Synthetic
gacatccagatgacccagagccccagcagcctgagcgcctctgtgggcgatagagtgaccatcacctgcagagccagccaggccatcgacagctacctgcactggtatcagcagaagcctggcaaggcccctaagctgctgatctacagcgccagcaatctggagaccggcgtgcctagcagattcagcggcctgggctccggcaccgacttcaccctgaccatcagcagcctgctgcctgaggatttcgccacctactactgccagcaggtggtgtggagacctttcaccttcggccagggcaccaaggtggagatcaagcgggtggagcccaagagcagcgataagacccacacctgccccccctgccctgcccccgagctgctgggcggacccagcgtgttcctgttcccccccaagcctaaggacaccctgatgatcagcagaacccccgaggtgacctgcgtggtggtggatgtgagccacgaggaccctgaggtgaagttcaactggtacgtggacggcgtggaggtgcacaatgccaagaccaagcccagggaggagcagtacaacagcacctaccgggtggtgtccgtgctgaccgtgctgcaccaggattggctgaacggcaaggagtacaagtgcaaggtgtccaacaaggccctgcctgcccctatcgagaaaaccatcagcaaggccaagggccagcccagagagccccaggtgtacaccctgccccctagcagagatgagctgaccaagaaccaggtgtccctgacctgcctggtgaagggcttctaccccagcgacatcgccgtggagtgggagagcaacggccagcccgagaacaactacaagaccaccccccctgtgctggacagcgatggcagcttcttcctgtacagcaagctgaccgtggacaagagcagatggcagcagggcaacgtgttcagctgcagcgtgatgcacgaggccctgcacaatcactacacccagaagagcctgagcctgtcccctggcaagtga

SEQ ID NO: 417 - DNA, 1026 bp, Artificial Sequence
  Synthetic
gacatccagatgacccagagccccagcagcctgagcgcctctgtgggcgatagagtgaccatcacctgcagagccagccaggccatcgacagctacctgcactggtatcagcagaagcctggcaaggcccctaagctgctgatctacagcgccagcaatctggagaccggcgtgcctagcagattcagcggctacggctccggcaccgacttcaccctgaccatcagcagcctgctgcctgaggatttcgccacctactactgccagcaggtggtgtggagacctttcaccttcggccagggcaccaaggtggagatcaagcgggtggagcccaagagcagcgataagacccacacctgccccccctgccctgcccccgagctgctgggcggacccagcgtgttcctgttcccccccaagcctaaggacaccctgatgatcagcagaacccccgaggtgacctgcgtggtggtggatgtgagccacgaggaccctgaggtgaagttcaactggtacgtggacggcgtggaggtgcacaatgccaagaccaagcccagggaggagcagtacaacagcacctaccgggtggtgtccgtgctgaccgtgctgcaccaggattggctgaacggcaaggagtacaagtgcaaggtgtccaacaaggccctgcctgcccctatcgagaaaaccatcagcaaggccaagggccagcccagagagccccaggtgtacaccctgccccctagcagagatgagctgaccaagaaccaggtgtccctgacctgcctggtgaagggcttctaccccagcgacatcgccgtggagtgggagagcaacggccagcccgagaacaactacaagaccaccccccctgtgctggacagcgatggcagcttcttcctgtacagcaagctgaccgtggacaagagcagatggcagcagggcaacgtgttcagctgcagcgtgatgcacgaggccctgcacaatcactacacccagaagagcctgagcctgtcccctggcaagtga

SEQ ID NO: 418 - DNA, 1026 bp, Artificial Sequence
  Synthetic
gacatccagatgacccagagccccagcagcctgagcgcctctgtgggcgatagagtgaccatcacctgcagagccagccaggccatcgacagctacctgcactggtatcagcagaagcctggcaaggcccctaagctgctgatctacagcgccagcaatctggagaccggcgtgcctagcagattcagcggcgacggctccggcaccgacttcaccctgaccatcagcagcctgctgcctgaggatttcgccacctactactgccagcaggtggtgtggagacctttcaccttcggccagggcaccaaggtggagatcaagcgggtggagcccaagagcagcgataagacccacacctgccccccctgccctgcccccgagctgctgggcggacccagcgtgttcctgttcccccccaagcctaaggacaccctgatgatcagcagaacccccgaggtgacctgcgtggtggtggatgtgagccacgaggaccctgaggtgaagttcaactggtacgtggacggcgtggaggtgcacaatgccaagaccaagcccagggaggagcagtacaacagcacctaccgggtggtgtccgtgctgaccgtgctgcaccaggattggctgaacggcaaggagtacaagtgcaaggtgtccaacaaggccctgcctgcccctatcgagaaaaccatcagcaaggccaagggccagcccagagagccccaggtgtacaccctgccccctagcagagatgagctgaccaagaaccaggtgtccctgacctgcctggtgaagggcttctaccccagcgacatcgccgtggagtgggagagcaacggccagcccgagaacaactacaagaccaccccccctgtgctggacagcgatggcagcttcttcctgtacagcaagctgaccgtggacaagagcagatggcagcagggcaacgtgttcagctgcagcgtgatgcacgaggccctgcacaatcactacacccagaagagcctgagcctgtcccctggcaagtga

SEQ ID NO: 419 - DNA, 1026 bp, Artificial Sequence
  Synthetic
gacatccagatgacccagagccccagcagcctgagcgcctctgtgggcgatagagtgaccatcacctgcagagccagccaggccatcgacagctacctgcactggtatcagcagaagcctggcaaggcccctaagctgctgatctacagcgccagcaatctggagaccggcgtgcctagcagattcagcggccagggctccggcaccgacttcaccctgaccatcagcagcctgctgcctgaggatttcgccacctactactgccagcaggtggtgtggagacctttcaccttcggccagggcaccaaggtggagatcaagcgggtggagcccaagagcagcgataagacccacacctgccccccctgccctgcccccgagctgctgggcggacccagcgtgttcctgttcccccccaagcctaaggacaccctgatgatcagcagaacccccgaggtgacctgcgtggtggtggatgtgagccacgaggaccctgaggtgaagttcaactggtacgtggacggcgtggaggtgcacaatgccaagaccaagcccagggaggagcagtacaacagcacctaccgggtggtgtccgtgctgaccgtgctgcaccaggattggctgaacggcaaggagtacaagtgcaaggtgtccaacaaggccctgcctgcccctatcgagaaaaccatcagcaaggccaagggccagcccagagagccccaggtgtacaccctgccccctagcagagatgagctgaccaagaaccaggtgtccctgacctgcctggtgaagggcttctaccccagcgacatcgccgtggagtgggagagcaacggccagcccgagaacaactacaagaccaccccccctgtgctggacagcgatggcagcttcttcctgtacagcaagctgaccgtggacaagagcagatggcagcagggcaacgtgttcagctgcagcgtgatgcacgaggccctgcacaatcactacacccagaagagcctgagcctgtcccctggcaagtga

SEQ ID NO: 420 - DNA, 1026 bp, Artificial Sequence
  Synthetic
gacatccagatgacccagagccccagcagcctgagcgcctctgtgggcgatagagtgaccatcacctgcagagccagccaggccatcgacagctacctgcactggtatcagcagaagcctggcaaggcccctaagctgctgatctacagcgccagcaatctggagaccggcgtgcctagcagattcagcggccacggctccggcaccgacttcaccctgaccatcagcagcctgctgcctgaggatttcgccacctactactgccagcaggtggtgtggagacctttcaccttcggccagggcaccaaggtggagatcaagcgggtggagcccaagagcagcgataagacccacacctgccccccctgccctgcccccgagctgctgggcggacccagcgtgttcctgttcccccccaagcctaaggacaccctgatgatcagcagaacccccgaggtgacctgcgtggtggtggatgtgagccacgaggaccctgaggtgaagttcaactggtacgtggacggcgtggaggtgcacaatgccaagaccaagcccagggaggagcagtacaacagcacctaccgggtggtgtccgtgctgaccgtgctgcaccaggattggctgaacggcaaggagtacaagtgcaaggtgtccaacaaggccctgcctgcccctatcgagaaaaccatcagcaaggccaagggccagcccagagagccccaggtgtacaccctgccccctagcagagatgagctgaccaagaaccaggtgtccctgacctgcctggtgaagggcttctaccccagcgacatcgccgtggagtgggagagcaacggccagcccgagaacaactacaagaccaccccccctgtgctggacagcgatggcagcttcttcctgtacagcaagctgaccgtggacaagagcagatggcagcagggcaacgtgttcagctgcagcgtgatgcacgaggccctgcacaatcactacacccagaagagcctgagcctgtcccctggcaagtga

SEQ ID NO: 421 - DNA, 1026 bp, Artificial Sequence
  Synthetic
gacatccagatgacccagagccccagcagcctgagcgcctctgtgggcgatagagtgaccatcacctgcagagccagccaggccatcgacagctacctgcactggtatcagcagaagcctggcaaggcccctaagctgctgatctacagcgccagcaatctggagaccggcgtgcctagcagattcagcggccccggctccggcaccgacttcaccctgaccatcagcagcctgctgcctgaggatttcgccacctactactgccagcaggtggtgtggagacctttcaccttcggccagggcaccaaggtggagatcaagcgggtggagcccaagagcagcgataagacccacacctgccccccctgccctgcccccgagctgctgggcggacccagcgtgttcctgttcccccccaagcctaaggacaccctgatgatcagcagaacccccgaggtgacctgcgtggtggtggatgtgagccacgaggaccctgaggtgaagttcaactggtacgtggacggcgtggaggtgcacaatgccaagaccaagcccagggaggagcagtacaacagcacctaccgggtggtgtccgtgctgaccgtgctgcaccaggattggctgaacggcaaggagtacaagtgcaaggtgtccaacaaggccctgcctgcccctatcgagaaaaccatcagcaaggccaagggccagcccagagagccccaggtgtacaccctgccccctagcagagatgagctgaccaagaaccaggtgtccctgacctgcctggtgaagggcttctaccccagcgacatcgccgtggagtgggagagcaacggccagcccgagaacaactacaagaccaccccccctgtgctggacagcgatggcagcttcttcctgtacagcaagctgaccgtggacaagagcagatggcagcagggcaacgtgttcagctgcagcgtgatgcacgaggccctgcacaatcactacacccagaagagcctgagcctgtcccctggcaagtga

SEQ ID NO: 422 - DNA, 1026 bp, Artificial Sequence
  Synthetic
gacatccagatgacccagagccccagcagcctgagcgcctctgtgggcgatagagtgaccatcacctgcagagccagccaggccatcgacagctacctgcactggtatcagcagaagcctggcaaggcccctaagctgctgatctacagcgccagcaatctggagaccggcgtgcctagcagattcagcggcaagggctccggcaccgacttcaccctgaccatcagcagcctgctgcctgaggatttcgccacctactactgccagcaggtggtgtggagacctttcaccttcggccagggcaccaaggtggagatcaagcgggtggagcccaagagcagcgataagacccacacctgccccccctgccctgcccccgagctgctgggcggacccagcgtgttcctgttcccccccaagcctaaggacaccctgatgatcagcagaacccccgaggtgacctgcgtggtggtggatgtgagccacgaggaccctgaggtgaagttcaactggtacgtggacggcgtggaggtgcacaatgccaagaccaagcccagggaggagcagtacaacagcacctaccgggtggtgtccgtgctgaccgtgctgcaccaggattggctgaacggcaaggagtacaagtgcaaggtgtccaacaaggccctgcctgcccctatcgagaaaaccatcagcaaggccaagggccagcccagagagccccaggtgtacaccctgccccctagcagagatgagctgaccaagaaccaggtgtccctgacctgcctggtgaagggcttctaccccagcgacatcgccgtggagtgggagagcaacggccagcccgagaacaactacaagaccaccccccctgtgctggacagcgatggcagcttcttcctgtacagcaagctgaccgtggacaagagcagatggcagcagggcaacgtgttcagctgcagcgtgatgcacgaggccctgcacaatcactacacccagaagagcctgagcctgtcccctggcaagtga

SEQ ID NO: 423 - DNA, 1026 bp, Artificial Sequence
  Synthetic
gacatccagatgacccagagccccagcagcctgagcgcctctgtgggcgatagagtgaccatcacctgcagagccagccaggccatcgacagctacctgcactggtatcagcagaagcctggcaaggcccctaagctgctgatctacagcgccagcaatctggagaccggcgtgcctagcagattcagcggcagcagctccggcaccgacttcaccctgaccatcagcagcctgctgcctgaggatttcgccacctactactgccagcaggtggtgtggagacctttcaccttcggccagggcaccaaggtggagatcaagcgggtggagcccaagagcagcgataagacccacacctgccccccctgccctgcccccgagctgctgggcggacccagcgtgttcctgttcccccccaagcctaaggacaccctgatgatcagcagaacccccgaggtgacctgcgtggtggtggatgtgagccacgaggaccctgaggtgaagttcaactggtacgtggacggcgtggaggtgcacaatgccaagaccaagcccagggaggagcagtacaacagcacctaccgggtggtgtccgtgctgaccgtgctgcaccaggattggctgaacggcaaggagtacaagtgcaaggtgtccaacaaggccctgcctgcccctatcgagaaaaccatcagcaaggccaagggccagcccagagagccccaggtgtacaccctgccccctagcagagatgagctgaccaagaaccaggtgtccctgacctgcctggtgaagggcttctaccccagcgacatcgccgtggagtgggagagcaacggccagcccgagaacaactacaagaccaccccccctgtgctggacagcgatggcagcttcttcctgtacagcaagctgaccgtggacaagagcagatggcagcagggcaacgtgttcagctgcagcgtgatgcacgaggccctgcacaatcactacacccagaagagcctgagcctgtcccctggcaagtga

SEQ ID NO: 424 - DNA, 1026 bp, Artificial Sequence
  Synthetic
gacatccagatgacccagagccccagcagcctgagcgcctctgtgggcgatagagtgaccatcacctgcagagccagccaggccatcgacagctacctgcactggtatcagcagaagcctggcaaggcccctaagctgctgatctacagcgccagcaatctggagaccggcgtgcctagcagattcagcggcagcctgtccggcaccgacttcaccctgaccatcagcagcctgctgcctgaggatttcgccacctactactgccagcaggtggtgtggagacctttcaccttcggccagggcaccaaggtggagatcaagcgggtggagcccaagagcagcgataagacccacacctgccccccctgccctgcccccgagctgctgggcggacccagcgtgttcctgttcccccccaagcctaaggacaccctgatgatcagcagaacccccgaggtgacctgcgtggtggtggatgtgagccacgaggaccctgaggtgaagttcaactggtacgtggacggcgtggaggtgcacaatgccaagaccaagcccagggaggagcagtacaacagcacctaccgggtggtgtccgtgctgaccgtgctgcaccaggattggctgaacggcaaggagtacaagtgcaaggtgtccaacaaggccctgcctgcccctatcgagaaaaccatcagcaaggccaagggccagcccagagagccccaggtgtacaccctgccccctagcagagatgagctgaccaagaaccaggtgtccctgacctgcctggtgaagggcttctaccccagcgacatcgccgtggagtgggagagcaacggccagcccgagaacaactacaagaccaccccccctgtgctggacagcgatggcagcttcttcctgtacagcaagctgaccgtggacaagagcagatggcagcagggcaacgtgttcagctgcagcgtgatgcacgaggccctgcacaatcactacacccagaagagcctgagcctgtcccctggcaagtga

SEQ ID NO: 425 - DNA, 1026 bp, Artificial Sequence
  Synthetic
gacatccagatgacccagagccccagcagcctgagcgcctctgtgggcgatagagtgaccatcacctgcagagccagccaggccatcgacagctacctgcactggtatcagcagaagcctggcaaggcccctaagctgctgatctacagcgccagcaatctggagaccggcgtgcctagcagattcagcggcagctactccggcaccgacttcaccctgaccatcagcagcctgctgcctgaggatttcgccacctactactgccagcaggtggtgtggagacctttcaccttcggccagggcaccaaggtggagatcaagcgggtggagcccaagagcagcgataagacccacacctgccccccctgccctgcccccgagctgctgggcggacccagcgtgttcctgttcccccccaagcctaaggacaccctgatgatcagcagaacccccgaggtgacctgcgtggtggtggatgtgagccacgaggaccctgaggtgaagttcaactggtacgtggacggcgtggaggtgcacaatgccaagaccaagcccagggaggagcagtacaacagcacctaccgggtggtgtccgtgctgaccgtgctgcaccaggattggctgaacggcaaggagtacaagtgcaaggtgtccaacaaggccctgcctgcccctatcgagaaaaccatcagcaaggccaagggccagcccagagagccccaggtgtacaccctgccccctagcagagatgagctgaccaagaaccaggtgtccctgacctgcctggtgaagggcttctaccccagcgacatcgccgtggagtgggagagcaacggccagcccgagaacaactacaagaccaccccccctgtgctggacagcgatggcagcttcttcctgtacagcaagctgaccgtggacaagagcagatggcagcagggcaacgtgttcagctgcagcgtgatgcacgaggccctgcacaatcactacacccagaagagcctgagcctgtcccctggcaagtga

SEQ ID NO: 426 - DNA, 1026 bp, Artificial Sequence
  Synthetic
gacatccagatgacccagagccccagcagcctgagcgcctctgtgggcgatagagtgaccatcacctgcagagccagccaggccatcgacagctacctgcactggtatcagcagaagcctggcaaggcccctaagctgctgatctacagcgccagcaatctggagaccggcgtgcctagcagattcagcggcagcgactccggcaccgacttcaccctgaccatcagcagcctgctgcctgaggatttcgccacctactactgccagcaggtggtgtggagacctttcaccttcggccagggcaccaaggtggagatcaagcgggtggagcccaagagcagcgataagacccacacctgccccccctgccctgcccccgagctgctgggcggacccagcgtgttcctgttcccccccaagcctaaggacaccctgatgatcagcagaacccccgaggtgacctgcgtggtggtggatgtgagccacgaggaccctgaggtgaagttcaactggtacgtggacggcgtggaggtgcacaatgccaagaccaagcccagggaggagcagtacaacagcacctaccgggtggtgtccgtgctgaccgtgctgcaccaggattggctgaacggcaaggagtacaagtgcaaggtgtccaacaaggccctgcctgcccctatcgagaaaaccatcagcaaggccaagggccagcccagagagccccaggtgtacaccctgccccctagcagagatgagctgaccaagaaccaggtgtccctgacctgcctggtgaagggcttctaccccagcgacatcgccgtggagtgggagagcaacggccagcccgagaacaactacaagaccaccccccctgtgctggacagcgatggcagcttcttcctgtacagcaagctgaccgtggacaagagcagatggcagcagggcaacgtgttcagctgcagcgtgatgcacgaggccctgcacaatcactacacccagaagagcctgagcctgtcccctggcaagtga

SEQ ID NO: 427 - DNA, 1026 bp, Artificial Sequence
  Synthetic
gacatccagatgacccagagccccagcagcctgagcgcctctgtgggcgatagagtgaccatcacctgcagagccagccaggccatcgacagctacctgcactggtatcagcagaagcctggcaaggcccctaagctgctgatctacagcgccagcaatctggagaccggcgtgcctagcagattcagcggcagccagtccggcaccgacttcaccctgaccatcagcagcctgctgcctgaggatttcgccacctactactgccagcaggtggtgtggagacctttcaccttcggccagggcaccaaggtggagatcaagcgggtggagcccaagagcagcgataagacccacacctgccccccctgccctgcccccgagctgctgggcggacccagcgtgttcctgttcccccccaagcctaaggacaccctgatgatcagcagaacccccgaggtgacctgcgtggtggtggatgtgagccacgaggaccctgaggtgaagttcaactggtacgtggacggcgtggaggtgcacaatgccaagaccaagcccagggaggagcagtacaacagcacctaccgggtggtgtccgtgctgaccgtgctgcaccaggattggctgaacggcaaggagtacaagtgcaaggtgtccaacaaggccctgcctgcccctatcgagaaaaccatcagcaaggccaagggccagcccagagagccccaggtgtacaccctgccccctagcagagatgagctgaccaagaaccaggtgtccctgacctgcctggtgaagggcttctaccccagcgacatcgccgtggagtgggagagcaacggccagcccgagaacaactacaagaccaccccccctgtgctggacagcgatggcagcttcttcctgtacagcaagctgaccgtggacaagagcagatggcagcagggcaacgtgttcagctgcagcgtgatgcacgaggccctgcacaatcactacacccagaagagcctgagcctgtcccctggcaagtga

SEQ ID NO: 428 - DNA, 1026 bp, Artificial Sequence
  Synthetic
gacatccagatgacccagagccccagcagcctgagcgcctctgtgggcgatagagtgaccatcacctgcagagccagccaggccatcgacagctacctgcactggtatcagcagaagcctggcaaggcccctaagctgctgatctacagcgccagcaatctggagaccggcgtgcctagcagattcagcggcagccactccggcaccgacttcaccctgaccatcagcagcctgctgcctgaggatttcgccacctactactgccagcaggtggtgtggagacctttcaccttcggccagggcaccaaggtggagatcaagcgggtggagcccaagagcagcgataagacccacacctgccccccctgccctgcccccgagctgctgggcggacccagcgtgttcctgttcccccccaagcctaaggacaccctgatgatcagcagaacccccgaggtgacctgcgtggtggtggatgtgagccacgaggaccctgaggtgaagttcaactggtacgtggacggcgtggaggtgcacaatgccaagaccaagcccagggaggagcagtacaacagcacctaccgggtggtgtccgtgctgaccgtgctgcaccaggattggctgaacggcaaggagtacaagtgcaaggtgtccaacaaggccctgcctgcccctatcgagaaaaccatcagcaaggccaagggccagcccagagagccccaggtgtacaccctgccccctagcagagatgagctgaccaagaaccaggtgtccctgacctgcctggtgaagggcttctaccccagcgacatcgccgtggagtgggagagcaacggccagcccgagaacaactacaagaccaccccccctgtgctggacagcgatggcagcttcttcctgtacagcaagctgaccgtggacaagagcagatggcagcagggcaacgtgttcagctgcagcgtgatgcacgaggccctgcacaatcactacacccagaagagcctgagcctgtcccctggcaagtga

SEQ ID NO: 429 - DNA, 1026 bp, Artificial Sequence
  Synthetic
gacatccagatgacccagagccccagcagcctgagcgcctctgtgggcgatagagtgaccatcacctgcagagccagccaggccatcgacagctacctgcactggtatcagcagaagcctggcaaggcccctaagctgctgatctacagcgccagcaatctggagaccggcgtgcctagcagattcagcggcagcccctccggcaccgacttcaccctgaccatcagcagcctgctgcctgaggatttcgccacctactactgccagcaggtggtgtggagacctttcaccttcggccagggcaccaaggtggagatcaagcgggtggagcccaagagcagcgataagacccacacctgccccccctgccctgcccccgagctgctgggcggacccagcgtgttcctgttcccccccaagcctaaggacaccctgatgatcagcagaacccccgaggtgacctgcgtggtggtggatgtgagccacgaggaccctgaggtgaagttcaactggtacgtggacggcgtggaggtgcacaatgccaagaccaagcccagggaggagcagtacaacagcacctaccgggtggtgtccgtgctgaccgtgctgcaccaggattggctgaacggcaaggagtacaagtgcaaggtgtccaacaaggccctgcctgcccctatcgagaaaaccatcagcaaggccaagggccagcccagagagccccaggtgtacaccctgccccctagcagagatgagctgaccaagaaccaggtgtccctgacctgcctggtgaagggcttctaccccagcgacatcgccgtggagtgggagagcaacggccagcccgagaacaactacaagaccaccccccctgtgctggacagcgatggcagcttcttcctgtacagcaagctgaccgtggacaagagcagatggcagcagggcaacgtgttcagctgcagcgtgatgcacgaggccctgcacaatcactacacccagaagagcctgagcctgtcccctggcaagtga

SEQ ID NO: 430 - DNA, 1026 bp, Artificial Sequence
  Synthetic
gacatccagatgacccagagccccagcagcctgagcgcctctgtgggcgatagagtgaccatcacctgcagagccagccaggccatcgacagctacctgcactggtatcagcagaagcctggcaaggcccctaagctgctgatctacagcgccagcaatctggagaccggcgtgcctagcagattcagcggcagcaagtccggcaccgacttcaccctgaccatcagcagcctgctgcctgaggatttcgccacctactactgccagcaggtggtgtggagacctttcaccttcggccagggcaccaaggtggagatcaagcgggtggagcccaagagcagcgataagacccacacctgccccccctgccctgcccccgagctgctgggcggacccagcgtgttcctgttcccccccaagcctaaggacaccctgatgatcagcagaacccccgaggtgacctgcgtggtggtggatgtgagccacgaggaccctgaggtgaagttcaactggtacgtggacggcgtggaggtgcacaatgccaagaccaagcccagggaggagcagtacaacagcacctaccgggtggtgtccgtgctgaccgtgctgcaccaggattggctgaacggcaaggagtacaagtgcaaggtgtccaacaaggccctgcctgcccctatcgagaaaaccatcagcaaggccaagggccagcccagagagccccaggtgtacaccctgccccctagcagagatgagctgaccaagaaccaggtgtccctgacctgcctggtgaagggcttctaccccagcgacatcgccgtggagtgggagagcaacggccagcccgagaacaactacaagaccaccccccctgtgctggacagcgatggcagcttcttcctgtacagcaagctgaccgtggacaagagcagatggcagcagggcaacgtgttcagctgcagcgtgatgcacgaggccctgcacaatcactacacccagaagagcctgagcctgtcccctggcaagtga

SEQ ID NO: 431 - DNA, 1026 bp, Artificial Sequence
  Synthetic
gacatccagatgacccagagccccagcagcctgagcgcctctgtgggcgatagagtgaccatcacctgcagagccagccaggccatcgacagctacctgcactggtatcagcagaagcctggcaaggcccctaagctgctgatctacagcgccagcaatctggagaccggcgtgcctagcagattcagcggcagcggcctgggcaccgacttcaccctgaccatcagcagcctgctgcctgaggatttcgccacctactactgccagcaggtggtgtggagacctttcaccttcggccagggcaccaaggtggagatcaagcgggtggagcccaagagcagcgataagacccacacctgccccccctgccctgcccccgagctgctgggcggacccagcgtgttcctgttcccccccaagcctaaggacaccctgatgatcagcagaacccccgaggtgacctgcgtggtggtggatgtgagccacgaggaccctgaggtgaagttcaactggtacgtggacggcgtggaggtgcacaatgccaagaccaagcccagggaggagcagtacaacagcacctaccgggtggtgtccgtgctgaccgtgctgcaccaggattggctgaacggcaaggagtacaagtgcaaggtgtccaacaaggccctgcctgcccctatcgagaaaaccatcagcaaggccaagggccagcccagagagccccaggtgtacaccctgccccctagcagagatgagctgaccaagaaccaggtgtccctgacctgcctggtgaagggcttctaccccagcgacatcgccgtggagtgggagagcaacggccagcccgagaacaactacaagaccaccccccctgtgctggacagcgatggcagcttcttcctgtacagcaagctgaccgtggacaagagcagatggcagcagggcaacgtgttcagctgcagcgtgatgcacgaggccctgcacaatcactacacccagaagagcctgagcctgtcccctggcaagtga

SEQ ID NO: 432 - DNA, 1026 bp, Artificial Sequence
  Synthetic
gacatccagatgacccagagccccagcagcctgagcgcctctgtgggcgatagagtgaccatcacctgcagagccagccaggccatcgacagctacctgcactggtatcagcagaagcctggcaaggcccctaagctgctgatctacagcgccagcaatctggagaccggcgtgcctagcagattcagcggcagcggcgacggcaccgacttcaccctgaccatcagcagcctgctgcctgaggatttcgccacctactactgccagcaggtggtgtggagacctttcaccttcggccagggcaccaaggtggagatcaagcgggtggagcccaagagcagcgataagacccacacctgccccccctgccctgcccccgagctgctgggcggacccagcgtgttcctgttcccccccaagcctaaggacaccctgatgatcagcagaacccccgaggtgacctgcgtggtggtggatgtgagccacgaggaccctgaggtgaagttcaactggtacgtggacggcgtggaggtgcacaatgccaagaccaagcccagggaggagcagtacaacagcacctaccgggtggtgtccgtgctgaccgtgctgcaccaggattggctgaacggcaaggagtacaagtgcaaggtgtccaacaaggccctgcctgcccctatcgagaaaaccatcagcaaggccaagggccagcccagagagccccaggtgtacaccctgccccctagcagagatgagctgaccaagaaccaggtgtccctgacctgcctggtgaagggcttctaccccagcgacatcgccgtggagtgggagagcaacggccagcccgagaacaactacaagaccaccccccctgtgctggacagcgatggcagcttcttcctgtacagcaagctgaccgtggacaagagcagatggcagcagggcaacgtgttcagctgcagcgtgatgcacgaggccctgcacaatcactacacccagaagagcctgagcctgtcccctggcaagtga

SEQ ID NO: 433 - DNA, 1026 bp, Artificial Sequence
  Synthetic
gacatccagatgacccagagccccagcagcctgagcgcctctgtgggcgatagagtgaccatcacctgcagagccagccaggccatcgacagctacctgcactggtatcagcagaagcctggcaaggcccctaagctgctgatctacagcgccagcaatctggagaccggcgtgcctagcagattcagcggcagcggccagggcaccgacttcaccctgaccatcagcagcctgctgcctgaggatttcgccacctactactgccagcaggtggtgtggagacctttcaccttcggccagggcaccaaggtggagatcaagcgggtggagcccaagagcagcgataagacccacacctgccccccctgccctgcccccgagctgctgggcggacccagcgtgttcctgttcccccccaagcctaaggacaccctgatgatcagcagaacccccgaggtgacctgcgtggtggtggatgtgagccacgaggaccctgaggtgaagttcaactggtacgtggacggcgtggaggtgcacaatgccaagaccaagcccagggaggagcagtacaacagcacctaccgggtggtgtccgtgctgaccgtgctgcaccaggattggctgaacggcaaggagtacaagtgcaaggtgtccaacaaggccctgcctgcccctatcgagaaaaccatcagcaaggccaagggccagcccagagagccccaggtgtacaccctgccccctagcagagatgagctgaccaagaaccaggtgtccctgacctgcctggtgaagggcttctaccccagcgacatcgccgtggagtgggagagcaacggccagcccgagaacaactacaagaccaccccccctgtgctggacagcgatggcagcttcttcctgtacagcaagctgaccgtggacaagagcagatggcagcagggcaacgtgttcagctgcagcgtgatgcacgaggccctgcacaatcactacacccagaagagcctgagcctgtcccctggcaagtga

SEQ ID NO: 434 - DNA, 1026 bp, Artificial Sequence
  Synthetic
gacatccagatgacccagagccccagcagcctgagcgcctctgtgggcgatagagtgaccatcacctgcagagccagccaggccatcgacagctacctgcactggtatcagcagaagcctggcaaggcccctaagctgctgatctacagcgccagcaatctggagaccggcgtgcctagcagattcagcggcagcggccacggcaccgacttcaccctgaccatcagcagcctgctgcctgaggatttcgccacctactactgccagcaggtggtgtggagacctttcaccttcggccagggcaccaaggtggagatcaagcgggtggagcccaagagcagcgataagacccacacctgccccccctgccctgcccccgagctgctgggcggacccagcgtgttcctgttcccccccaagcctaaggacaccctgatgatcagcagaacccccgaggtgacctgcgtggtggtggatgtgagccacgaggaccctgaggtgaagttcaactggtacgtggacggcgtggaggtgcacaatgccaagaccaagcccagggaggagcagtacaacagcacctaccgggtggtgtccgtgctgaccgtgctgcaccaggattggctgaacggcaaggagtacaagtgcaaggtgtccaacaaggccctgcctgcccctatcgagaaaaccatcagcaaggccaagggccagcccagagagccccaggtgtacaccctgccccctagcagagatgagctgaccaagaaccaggtgtccctgacctgcctggtgaagggcttctaccccagcgacatcgccgtggagtgggagagcaacggccagcccgagaacaactacaagaccaccccccctgtgctggacagcgatggcagcttcttcctgtacagcaagctgaccgtggacaagagcagatggcagcagggcaacgtgttcagctgcagcgtgatgcacgaggccctgcacaatcactacacccagaagagcctgagcctgtcccctggcaagtga

SEQ ID NO: 435 - DNA, 1026 bp, Artificial Sequence
  Synthetic
gacatccagatgacccagagccccagcagcctgagcgcctctgtgggcgatagagtgaccatcacctgcagagccagccaggccatcgacagctacctgcactggtatcagcagaagcctggcaaggcccctaagctgctgatctacagcgccagcaatctggagaccggcgtgcctagcagattcagcggcagcggcaagggcaccgacttcaccctgaccatcagcagcctgctgcctgaggatttcgccacctactactgccagcaggtggtgtggagacctttcaccttcggccagggcaccaaggtggagatcaagcgggtggagcccaagagcagcgataagacccacacctgccccccctgccctgcccccgagctgctgggcggacccagcgtgttcctgttcccccccaagcctaaggacaccctgatgatcagcagaacccccgaggtgacctgcgtggtggtggatgtgagccacgaggaccctgaggtgaagttcaactggtacgtggacggcgtggaggtgcacaatgccaagaccaagcccagggaggagcagtacaacagcacctaccgggtggtgtccgtgctgaccgtgctgcaccaggattggctgaacggcaaggagtacaagtgcaaggtgtccaacaaggccctgcctgcccctatcgagaaaaccatcagcaaggccaagggccagcccagagagccccaggtgtacaccctgccccctagcagagatgagctgaccaagaaccaggtgtccctgacctgcctggtgaagggcttctaccccagcgacatcgccgtggagtgggagagcaacggccagcccgagaacaactacaagaccaccccccctgtgctggacagcgatggcagcttcttcctgtacagcaagctgaccgtggacaagagcagatggcagcagggcaacgtgttcagctgcagcgtgatgcacgaggccctgcacaatcactacacccagaagagcctgagcctgtcccctggcaagtga

SEQ ID NO: 436 - DNA, 1026 bp, Artificial Sequence
  Synthetic
gacatccagatgacccagagccccagcagcctgagcgcctctgtgggcgatagagtgaccatcacctgcagagccagccaggccatcgacagctacctgcactggtatcagcagaagcctggcaaggcccctaagctgctgatctacagcgccagcaatctggagaccggcgtgcctagcagattcagcggcagcggctccagcaccgacttcaccctgaccatcagcagcctgctgcctgaggatttcgccacctactactgccagcaggtggtgtggagacctttcaccttcggccagggcaccaaggtggagatcaagcgggtggagcccaagagcagcgataagacccacacctgccccccctgccctgcccccgagctgctgggcggacccagcgtgttcctgttcccccccaagcctaaggacaccctgatgatcagcagaacccccgaggtgacctgcgtggtggtggatgtgagccacgaggaccctgaggtgaagttcaactggtacgtggacggcgtggaggtgcacaatgccaagaccaagcccagggaggagcagtacaacagcacctaccgggtggtgtccgtgctgaccgtgctgcaccaggattggctgaacggcaaggagtacaagtgcaaggtgtccaacaaggccctgcctgcccctatcgagaaaaccatcagcaaggccaagggccagcccagagagccccaggtgtacaccctgccccctagcagagatgagctgaccaagaaccaggtgtccctgacctgcctggtgaagggcttctaccccagcgacatcgccgtggagtgggagagcaacggccagcccgagaacaactacaagaccaccccccctgtgctggacagcgatggcagcttcttcctgtacagcaagctgaccgtggacaagagcagatggcagcagggcaacgtgttcagctgcagcgtgatgcacgaggccctgcacaatcactacacccagaagagcctgagcctgtcccctggcaagtga

SEQ ID NO: 437 - DNA, 1026 bp, Artificial Sequence
  Synthetic
gacatccagatgacccagagccccagcagcctgagcgcctctgtgggcgatagagtgaccatcacctgcagagccagccaggccatcgacagctacctgcactggtatcagcagaagcctggcaaggcccctaagctgctgatctacagcgccagcaatctggagaccggcgtgcctagcagattcagcggcagcggctccctgaccgacttcaccctgaccatcagcagcctgctgcctgaggatttcgccacctactactgccagcaggtggtgtggagacctttcaccttcggccagggcaccaaggtggagatcaagcgggtggagcccaagagcagcgataagacccacacctgccccccctgccctgcccccgagctgctgggcggacccagcgtgttcctgttcccccccaagcctaaggacaccctgatgatcagcagaacccccgaggtgacctgcgtggtggtggatgtgagccacgaggaccctgaggtgaagttcaactggtacgtggacggcgtggaggtgcacaatgccaagaccaagcccagggaggagcagtacaacagcacctaccgggtggtgtccgtgctgaccgtgctgcaccaggattggctgaacggcaaggagtacaagtgcaaggtgtccaacaaggccctgcctgcccctatcgagaaaaccatcagcaaggccaagggccagcccagagagccccaggtgtacaccctgccccctagcagagatgagctgaccaagaaccaggtgtccctgacctgcctggtgaagggcttctaccccagcgacatcgccgtggagtgggagagcaacggccagcccgagaacaactacaagaccaccccccctgtgctggacagcgatggcagcttcttcctgtacagcaagctgaccgtggacaagagcagatggcagcagggcaacgtgttcagctgcagcgtgatgcacgaggccctgcacaatcactacacccagaagagcctgagcctgtcccctggcaagtga

SEQ ID NO: 438 - DNA, 1026 bp, Artificial Sequence
  Synthetic
gacatccagatgacccagagccccagcagcctgagcgcctctgtgggcgatagagtgaccatcacctgcagagccagccaggccatcgacagctacctgcactggtatcagcagaagcctggcaaggcccctaagctgctgatctacagcgccagcaatctggagaccggcgtgcctagcagattcagcggcagcggctcctacaccgacttcaccctgaccatcagcagcctgctgcctgaggatttcgccacctactactgccagcaggtggtgtggagacctttcaccttcggccagggcaccaaggtggagatcaagcgggtggagcccaagagcagcgataagacccacacctgccccccctgccctgcccccgagctgctgggcggacccagcgtgttcctgttcccccccaagcctaaggacaccctgatgatcagcagaacccccgaggtgacctgcgtggtggtggatgtgagccacgaggaccctgaggtgaagttcaactggtacgtggacggcgtggaggtgcacaatgccaagaccaagcccagggaggagcagtacaacagcacctaccgggtggtgtccgtgctgaccgtgctgcaccaggattggctgaacggcaaggagtacaagtgcaaggtgtccaacaaggccctgcctgcccctatcgagaaaaccatcagcaaggccaagggccagcccagagagccccaggtgtacaccctgccccctagcagagatgagctgaccaagaaccaggtgtccctgacctgcctggtgaagggcttctaccccagcgacatcgccgtggagtgggagagcaacggccagcccgagaacaactacaagaccaccccccctgtgctggacagcgatggcagcttcttcctgtacagcaagctgaccgtggacaagagcagatggcagcagggcaacgtgttcagctgcagcgtgatgcacgaggccctgcacaatcactacacccagaagagcctgagcctgtcccctggcaagtga

SEQ ID NO: 439 - DNA, 1026 bp, Artificial Sequence
  Synthetic
gacatccagatgacccagagccccagcagcctgagcgcctctgtgggcgatagagtgaccatcacctgcagagccagccaggccatcgacagctacctgcactggtatcagcagaagcctggcaaggcccctaagctgctgatctacagcgccagcaatctggagaccggcgtgcctagcagattcagcggcagcggctccgacaccgacttcaccctgaccatcagcagcctgctgcctgaggatttcgccacctactactgccagcaggtggtgtggagacctttcaccttcggccagggcaccaaggtggagatcaagcgggtggagcccaagagcagcgataagacccacacctgccccccctgccctgcccccgagctgctgggcggacccagcgtgttcctgttcccccccaagcctaaggacaccctgatgatcagcagaacccccgaggtgacctgcgtggtggtggatgtgagccacgaggaccctgaggtgaagttcaactggtacgtggacggcgtggaggtgcacaatgccaagaccaagcccagggaggagcagtacaacagcacctaccgggtggtgtccgtgctgaccgtgctgcaccaggattggctgaacggcaaggagtacaagtgcaaggtgtccaacaaggccctgcctgcccctatcgagaaaaccatcagcaaggccaagggccagcccagagagccccaggtgtacaccctgccccctagcagagatgagctgaccaagaaccaggtgtccctgacctgcctggtgaagggcttctaccccagcgacatcgccgtggagtgggagagcaacggccagcccgagaacaactacaagaccaccccccctgtgctggacagcgatggcagcttcttcctgtacagcaagctgaccgtggacaagagcagatggcagcagggcaacgtgttcagctgcagcgtgatgcacgaggccctgcacaatcactacacccagaagagcctgagcctgtcccctggcaagtga

SEQ ID NO: 440 - DNA, 1026 bp, Artificial Sequence
  Synthetic
gacatccagatgacccagagccccagcagcctgagcgcctctgtgggcgatagagtgaccatcacctgcagagccagccaggccatcgacagctacctgcactggtatcagcagaagcctggcaaggcccctaagctgctgatctacagcgccagcaatctggagaccggcgtgcctagcagattcagcggcagcggctcccagaccgacttcaccctgaccatcagcagcctgctgcctgaggatttcgccacctactactgccagcaggtggtgtggagacctttcaccttcggccagggcaccaaggtggagatcaagcgggtggagcccaagagcagcgataagacccacacctgccccccctgccctgcccccgagctgctgggcggacccagcgtgttcctgttcccccccaagcctaaggacaccctgatgatcagcagaacccccgaggtgacctgcgtggtggtggatgtgagccacgaggaccctgaggtgaagttcaactggtacgtggacggcgtggaggtgcacaatgccaagaccaagcccagggaggagcagtacaacagcacctaccgggtggtgtccgtgctgaccgtgctgcaccaggattggctgaacggcaaggagtacaagtgcaaggtgtccaacaaggccctgcctgcccctatcgagaaaaccatcagcaaggccaagggccagcccagagagccccaggtgtacaccctgccccctagcagagatgagctgaccaagaaccaggtgtccctgacctgcctggtgaagggcttctaccccagcgacatcgccgtggagtgggagagcaacggccagcccgagaacaactacaagaccaccccccctgtgctggacagcgatggcagcttcttcctgtacagcaagctgaccgtggacaagagcagatggcagcagggcaacgtgttcagctgcagcgtgatgcacgaggccctgcacaatcactacacccagaagagcctgagcctgtcccctggcaagtga

SEQ ID NO: 441 - DNA, 1026 bp, Artificial Sequence
  Synthetic
gacatccagatgacccagagccccagcagcctgagcgcctctgtgggcgatagagtgaccatcacctgcagagccagccaggccatcgacagctacctgcactggtatcagcagaagcctggcaaggcccctaagctgctgatctacagcgccagcaatctggagaccggcgtgcctagcagattcagcggcagcggctcccacaccgacttcaccctgaccatcagcagcctgctgcctgaggatttcgccacctactactgccagcaggtggtgtggagacctttcaccttcggccagggcaccaaggtggagatcaagcgggtggagcccaagagcagcgataagacccacacctgccccccctgccctgcccccgagctgctgggcggacccagcgtgttcctgttcccccccaagcctaaggacaccctgatgatcagcagaacccccgaggtgacctgcgtggtggtggatgtgagccacgaggaccctgaggtgaagttcaactggtacgtggacggcgtggaggtgcacaatgccaagaccaagcccagggaggagcagtacaacagcacctaccgggtggtgtccgtgctgaccgtgctgcaccaggattggctgaacggcaaggagtacaagtgcaaggtgtccaacaaggccctgcctgcccctatcgagaaaaccatcagcaaggccaagggccagcccagagagccccaggtgtacaccctgccccctagcagagatgagctgaccaagaaccaggtgtccctgacctgcctggtgaagggcttctaccccagcgacatcgccgtggagtgggagagcaacggccagcccgagaacaactacaagaccaccccccctgtgctggacagcgatggcagcttcttcctgtacagcaagctgaccgtggacaagagcagatggcagcagggcaacgtgttcagctgcagcgtgatgcacgaggccctgcacaatcactacacccagaagagcctgagcctgtcccctggcaagtga

SEQ ID NO: 442 - DNA, 1026 bp, Artificial Sequence
  Synthetic
gacatccagatgacccagagccccagcagcctgagcgcctctgtgggcgatagagtgaccatcacctgcagagccagccaggccatcgacagctacctgcactggtatcagcagaagcctggcaaggcccctaagctgctgatctacagcgccagcaatctggagaccggcgtgcctagcagattcagcggcagcggctcccccaccgacttcaccctgaccatcagcagcctgctgcctgaggatttcgccacctactactgccagcaggtggtgtggagacctttcaccttcggccagggcaccaaggtggagatcaagcgggtggagcccaagagcagcgataagacccacacctgccccccctgccctgcccccgagctgctgggcggacccagcgtgttcctgttcccccccaagcctaaggacaccctgatgatcagcagaacccccgaggtgacctgcgtggtggtggatgtgagccacgaggaccctgaggtgaagttcaactggtacgtggacggcgtggaggtgcacaatgccaagaccaagcccagggaggagcagtacaacagcacctaccgggtggtgtccgtgctgaccgtgctgcaccaggattggctgaacggcaaggagtacaagtgcaaggtgtccaacaaggccctgcctgcccctatcgagaaaaccatcagcaaggccaagggccagcccagagagccccaggtgtacaccctgccccctagcagagatgagctgaccaagaaccaggtgtccctgacctgcctggtgaagggcttctaccccagcgacatcgccgtggagtgggagagcaacggccagcccgagaacaactacaagaccaccccccctgtgctggacagcgatggcagcttcttcctgtacagcaagctgaccgtggacaagagcagatggcagcagggcaacgtgttcagctgcagcgtgatgcacgaggccctgcacaatcactacacccagaagagcctgagcctgtcccctggcaagtga

SEQ ID NO: 443 - DNA, 1026 bp, Artificial Sequence
  Synthetic
gacatccagatgacccagagccccagcagcctgagcgcctctgtgggcgatagagtgaccatcacctgcagagccagccaggccatcgacagctacctgcactggtatcagcagaagcctggcaaggcccctaagctgctgatctacagcgccagcaatctggagaccggcgtgcctagcagattcagcggcagcggctccaagaccgacttcaccctgaccatcagcagcctgctgcctgaggatttcgccacctactactgccagcaggtggtgtggagacctttcaccttcggccagggcaccaaggtggagatcaagcgggtggagcccaagagcagcgataagacccacacctgccccccctgccctgcccccgagctgctgggcggacccagcgtgttcctgttcccccccaagcctaaggacaccctgatgatcagcagaacccccgaggtgacctgcgtggtggtggatgtgagccacgaggaccctgaggtgaagttcaactggtacgtggacggcgtggaggtgcacaatgccaagaccaagcccagggaggagcagtacaacagcacctaccgggtggtgtccgtgctgaccgtgctgcaccaggattggctgaacggcaaggagtacaagtgcaaggtgtccaacaaggccctgcctgcccctatcgagaaaaccatcagcaaggccaagggccagcccagagagccccaggtgtacaccctgccccctagcagagatgagctgaccaagaaccaggtgtccctgacctgcctggtgaagggcttctaccccagcgacatcgccgtggagtgggagagcaacggccagcccgagaacaactacaagaccaccccccctgtgctggacagcgatggcagcttcttcctgtacagcaagctgaccgtggacaagagcagatggcagcagggcaacgtgttcagctgcagcgtgatgcacgaggccctgcacaatcactacacccagaagagcctgagcctgtcccctggcaagtga

SEQ ID NO: 444 - DNA, 1026 bp, Artificial Sequence
  Synthetic
gacatccagatgacccagagccccagcagcctgagcgcctctgtgggcgatagagtgaccatcacctgcagagccagccaggccatcgacagctacctgcactggtatcagcagaagcctggcaaggcccctaagctgctgatctacagcgccagcaatctggagaccggcgtgcctagcagattcagcggcagcggctccggcctggacttcaccctgaccatcagcagcctgctgcctgaggatttcgccacctactactgccagcaggtggtgtggagacctttcaccttcggccagggcaccaaggtggagatcaagcgggtggagcccaagagcagcgataagacccacacctgccccccctgccctgcccccgagctgctgggcggacccagcgtgttcctgttcccccccaagcctaaggacaccctgatgatcagcagaacccccgaggtgacctgcgtggtggtggatgtgagccacgaggaccctgaggtgaagttcaactggtacgtggacggcgtggaggtgcacaatgccaagaccaagcccagggaggagcagtacaacagcacctaccgggtggtgtccgtgctgaccgtgctgcaccaggattggctgaacggcaaggagtacaagtgcaaggtgtccaacaaggccctgcctgcccctatcgagaaaaccatcagcaaggccaagggccagcccagagagccccaggtgtacaccctgccccctagcagagatgagctgaccaagaaccaggtgtccctgacctgcctggtgaagggcttctaccccagcgacatcgccgtggagtgggagagcaacggccagcccgagaacaactacaagaccaccccccctgtgctggacagcgatggcagcttcttcctgtacagcaagctgaccgtggacaagagcagatggcagcagggcaacgtgttcagctgcagcgtgatgcacgaggccctgcacaatcactacacccagaagagcctgagcctgtcccctggcaagtga

SEQ ID NO: 445 - DNA, 1026 bp, Artificial Sequence
  Synthetic
gacatccagatgacccagagccccagcagcctgagcgcctctgtgggcgatagagtgaccatcacctgcagagccagccaggccatcgacagctacctgcactggtatcagcagaagcctggcaaggcccctaagctgctgatctacagcgccagcaatctggagaccggcgtgcctagcagattcagcggcagcggctccggctacgacttcaccctgaccatcagcagcctgctgcctgaggatttcgccacctactactgccagcaggtggtgtggagacctttcaccttcggccagggcaccaaggtggagatcaagcgggtggagcccaagagcagcgataagacccacacctgccccccctgccctgcccccgagctgctgggcggacccagcgtgttcctgttcccccccaagcctaaggacaccctgatgatcagcagaacccccgaggtgacctgcgtggtggtggatgtgagccacgaggaccctgaggtgaagttcaactggtacgtggacggcgtggaggtgcacaatgccaagaccaagcccagggaggagcagtacaacagcacctaccgggtggtgtccgtgctgaccgtgctgcaccaggattggctgaacggcaaggagtacaagtgcaaggtgtccaacaaggccctgcctgcccctatcgagaaaaccatcagcaaggccaagggccagcccagagagccccaggtgtacaccctgccccctagcagagatgagctgaccaagaaccaggtgtccctgacctgcctggtgaagggcttctaccccagcgacatcgccgtggagtgggagagcaacggccagcccgagaacaactacaagaccaccccccctgtgctggacagcgatggcagcttcttcctgtacagcaagctgaccgtggacaagagcagatggcagcagggcaacgtgttcagctgcagcgtgatgcacgaggccctgcacaatcactacacccagaagagcctgagcctgtcccctggcaagtga

SEQ ID NO: 446 - DNA, 1026 bp, Artificial Sequence
  Synthetic
gacatccagatgacccagagccccagcagcctgagcgcctctgtgggcgatagagtgaccatcacctgcagagccagccaggccatcgacagctacctgcactggtatcagcagaagcctggcaaggcccctaagctgctgatctacagcgccagcaatctggagaccggcgtgcctagcagattcagcggcagcggctccggcgacgacttcaccctgaccatcagcagcctgctgcctgaggatttcgccacctactactgccagcaggtggtgtggagacctttcaccttcggccagggcaccaaggtggagatcaagcgggtggagcccaagagcagcgataagacccacacctgccccccctgccctgcccccgagctgctgggcggacccagcgtgttcctgttcccccccaagcctaaggacaccctgatgatcagcagaacccccgaggtgacctgcgtggtggtggatgtgagccacgaggaccctgaggtgaagttcaactggtacgtggacggcgtggaggtgcacaatgccaagaccaagcccagggaggagcagtacaacagcacctaccgggtggtgtccgtgctgaccgtgctgcaccaggattggctgaacggcaaggagtacaagtgcaaggtgtccaacaaggccctgcctgcccctatcgagaaaaccatcagcaaggccaagggccagcccagagagccccaggtgtacaccctgccccctagcagagatgagctgaccaagaaccaggtgtccctgacctgcctggtgaagggcttctaccccagcgacatcgccgtggagtgggagagcaacggccagcccgagaacaactacaagaccaccccccctgtgctggacagcgatggcagcttcttcctgtacagcaagctgaccgtggacaagagcagatggcagcagggcaacgtgttcagctgcagcgtgatgcacgaggccctgcacaatcactacacccagaagagcctgagcctgtcccctggcaagtga

SEQ ID NO: 447 - DNA, 1026 bp, Artificial Sequence
  Synthetic
gacatccagatgacccagagccccagcagcctgagcgcctctgtgggcgatagagtgaccatcacctgcagagccagccaggccatcgacagctacctgcactggtatcagcagaagcctggcaaggcccctaagctgctgatctacagcgccagcaatctggagaccggcgtgcctagcagattcagcggcagcggctccggccaggacttcaccctgaccatcagcagcctgctgcctgaggatttcgccacctactactgccagcaggtggtgtggagacctttcaccttcggccagggcaccaaggtggagatcaagcgggtggagcccaagagcagcgataagacccacacctgccccccctgccctgcccccgagctgctgggcggacccagcgtgttcctgttcccccccaagcctaaggacaccctgatgatcagcagaacccccgaggtgacctgcgtggtggtggatgtgagccacgaggaccctgaggtgaagttcaactggtacgtggacggcgtggaggtgcacaatgccaagaccaagcccagggaggagcagtacaacagcacctaccgggtggtgtccgtgctgaccgtgctgcaccaggattggctgaacggcaaggagtacaagtgcaaggtgtccaacaaggccctgcctgcccctatcgagaaaaccatcagcaaggccaagggccagcccagagagccccaggtgtacaccctgccccctagcagagatgagctgaccaagaaccaggtgtccctgacctgcctggtgaagggcttctaccccagcgacatcgccgtggagtgggagagcaacggccagcccgagaacaactacaagaccaccccccctgtgctggacagcgatggcagcttcttcctgtacagcaagctgaccgtggacaagagcagatggcagcagggcaacgtgttcagctgcagcgtgatgcacgaggccctgcacaatcactacacccagaagagcctgagcctgtcccctggcaagtga

SEQ ID NO: 448 - DNA, 1026 bp, Artificial Sequence
  Synthetic
gacatccagatgacccagagccccagcagcctgagcgcctctgtgggcgatagagtgaccatcacctgcagagccagccaggccatcgacagctacctgcactggtatcagcagaagcctggcaaggcccctaagctgctgatctacagcgccagcaatctggagaccggcgtgcctagcagattcagcggcagcggctccggccacgacttcaccctgaccatcagcagcctgctgcctgaggatttcgccacctactactgccagcaggtggtgtggagacctttcaccttcggccagggcaccaaggtggagatcaagcgggtggagcccaagagcagcgataagacccacacctgccccccctgccctgcccccgagctgctgggcggacccagcgtgttcctgttcccccccaagcctaaggacaccctgatgatcagcagaacccccgaggtgacctgcgtggtggtggatgtgagccacgaggaccctgaggtgaagttcaactggtacgtggacggcgtggaggtgcacaatgccaagaccaagcccagggaggagcagtacaacagcacctaccgggtggtgtccgtgctgaccgtgctgcaccaggattggctgaacggcaaggagtacaagtgcaaggtgtccaacaaggccctgcctgcccctatcgagaaaaccatcagcaaggccaagggccagcccagagagccccaggtgtacaccctgccccctagcagagatgagctgaccaagaaccaggtgtccctgacctgcctggtgaagggcttctaccccagcgacatcgccgtggagtgggagagcaacggccagcccgagaacaactacaagaccaccccccctgtgctggacagcgatggcagcttcttcctgtacagcaagctgaccgtggacaagagcagatggcagcagggcaacgtgttcagctgcagcgtgatgcacgaggccctgcacaatcactacacccagaagagcctgagcctgtcccctggcaagtga

SEQ ID NO: 449 - DNA, 1026 bp, Artificial Sequence
  Synthetic
gacatccagatgacccagagccccagcagcctgagcgcctctgtgggcgatagagtgaccatcacctgcagagccagccaggccatcgacagctacctgcactggtatcagcagaagcctggcaaggcccctaagctgctgatctacagcgccagcaatctggagaccggcgtgcctagcagattcagcggcagcggctccggccccgacttcaccctgaccatcagcagcctgctgcctgaggatttcgccacctactactgccagcaggtggtgtggagacctttcaccttcggccagggcaccaaggtggagatcaagcgggtggagcccaagagcagcgataagacccacacctgccccccctgccctgcccccgagctgctgggcggacccagcgtgttcctgttcccccccaagcctaaggacaccctgatgatcagcagaacccccgaggtgacctgcgtggtggtggatgtgagccacgaggaccctgaggtgaagttcaactggtacgtggacggcgtggaggtgcacaatgccaagaccaagcccagggaggagcagtacaacagcacctaccgggtggtgtccgtgctgaccgtgctgcaccaggattggctgaacggcaaggagtacaagtgcaaggtgtccaacaaggccctgcctgcccctatcgagaaaaccatcagcaaggccaagggccagcccagagagccccaggtgtacaccctgccccctagcagagatgagctgaccaagaaccaggtgtccctgacctgcctggtgaagggcttctaccccagcgacatcgccgtggagtgggagagcaacggccagcccgagaacaactacaagaccaccccccctgtgctggacagcgatggcagcttcttcctgtacagcaagctgaccgtggacaagagcagatggcagcagggcaacgtgttcagctgcagcgtgatgcacgaggccctgcacaatcactacacccagaagagcctgagcctgtcccctggcaagtga

SEQ ID NO: 450 - DNA, 1026 bp, Artificial Sequence
  Synthetic
gacatccagatgacccagagccccagcagcctgagcgcctctgtgggcgatagagtgaccatcacctgcagagccagccaggccatcgacagctacctgcactggtatcagcagaagcctggcaaggcccctaagctgctgatctacagcgccagcaatctggagaccggcgtgcctagcagattcagcggcagcggctccggcaaggacttcaccctgaccatcagcagcctgctgcctgaggatttcgccacctactactgccagcaggtggtgtggagacctttcaccttcggccagggcaccaaggtggagatcaagcgggtggagcccaagagcagcgataagacccacacctgccccccctgccctgcccccgagctgctgggcggacccagcgtgttcctgttcccccccaagcctaaggacaccctgatgatcagcagaacccccgaggtgacctgcgtggtggtggatgtgagccacgaggaccctgaggtgaagttcaactggtacgtggacggcgtggaggtgcacaatgccaagaccaagcccagggaggagcagtacaacagcacctaccgggtggtgtccgtgctgaccgtgctgcaccaggattggctgaacggcaaggagtacaagtgcaaggtgtccaacaaggccctgcctgcccctatcgagaaaaccatcagcaaggccaagggccagcccagagagccccaggtgtacaccctgccccctagcagagatgagctgaccaagaaccaggtgtccctgacctgcctggtgaagggcttctaccccagcgacatcgccgtggagtgggagagcaacggccagcccgagaacaactacaagaccaccccccctgtgctggacagcgatggcagcttcttcctgtacagcaagctgaccgtggacaagagcagatggcagcagggcaacgtgttcagctgcagcgtgatgcacgaggccctgcacaatcactacacccagaagagcctgagcctgtcccctggcaagtga

SEQ ID NO: 451 - DNA, 1026 bp, Artificial Sequence
  Synthetic
gacatccagatgacccagagccccagcagcctgagcgcctctgtgggcgatagagtgaccatcacctgcagagccagccaggccatcgacagctacctgcactggtatcagcagaagcctggcaaggcccctaagctgctgatctacagcgccagcaatctggagaccggcgtgcctagcagattcagcggcagcggctccggcaccagcttcaccctgaccatcagcagcctgctgcctgaggatttcgccacctactactgccagcaggtggtgtggagacctttcaccttcggccagggcaccaaggtggagatcaagcgggtggagcccaagagcagcgataagacccacacctgccccccctgccctgcccccgagctgctgggcggacccagcgtgttcctgttcccccccaagcctaaggacaccctgatgatcagcagaacccccgaggtgacctgcgtggtggtggatgtgagccacgaggaccctgaggtgaagttcaactggtacgtggacggcgtggaggtgcacaatgccaagaccaagcccagggaggagcagtacaacagcacctaccgggtggtgtccgtgctgaccgtgctgcaccaggattggctgaacggcaaggagtacaagtgcaaggtgtccaacaaggccctgcctgcccctatcgagaaaaccatcagcaaggccaagggccagcccagagagccccaggtgtacaccctgccccctagcagagatgagctgaccaagaaccaggtgtccctgacctgcctggtgaagggcttctaccccagcgacatcgccgtggagtgggagagcaacggccagcccgagaacaactacaagaccaccccccctgtgctggacagcgatggcagcttcttcctgtacagcaagctgaccgtggacaagagcagatggcagcagggcaacgtgttcagctgcagcgtgatgcacgaggccctgcacaatcactacacccagaagagcctgagcctgtcccctggcaagtga

SEQ ID NO: 452 - DNA, 1026 bp, Artificial Sequence
  Synthetic
gacatccagatgacccagagccccagcagcctgagcgcctctgtgggcgatagagtgaccatcacctgcagagccagccaggccatcgacagctacctgcactggtatcagcagaagcctggcaaggcccctaagctgctgatctacagcgccagcaatctggagaccggcgtgcctagcagattcagcggcagcggctccggcaccctgttcaccctgaccatcagcagcctgctgcctgaggatttcgccacctactactgccagcaggtggtgtggagacctttcaccttcggccagggcaccaaggtggagatcaagcgggtggagcccaagagcagcgataagacccacacctgccccccctgccctgcccccgagctgctgggcggacccagcgtgttcctgttcccccccaagcctaaggacaccctgatgatcagcagaacccccgaggtgacctgcgtggtggtggatgtgagccacgaggaccctgaggtgaagttcaactggtacgtggacggcgtggaggtgcacaatgccaagaccaagcccagggaggagcagtacaacagcacctaccgggtggtgtccgtgctgaccgtgctgcaccaggattggctgaacggcaaggagtacaagtgcaaggtgtccaacaaggccctgcctgcccctatcgagaaaaccatcagcaaggccaagggccagcccagagagccccaggtgtacaccctgccccctagcagagatgagctgaccaagaaccaggtgtccctgacctgcctggtgaagggcttctaccccagcgacatcgccgtggagtgggagagcaacggccagcccgagaacaactacaagaccaccccccctgtgctggacagcgatggcagcttcttcctgtacagcaagctgaccgtggacaagagcagatggcagcagggcaacgtgttcagctgcagcgtgatgcacgaggccctgcacaatcactacacccagaagagcctgagcctgtcccctggcaagtga

SEQ ID NO: 453 - DNA, 1026 bp, Artificial Sequence
  Synthetic
gacatccagatgacccagagccccagcagcctgagcgcctctgtgggcgatagagtgaccatcacctgcagagccagccaggccatcgacagctacctgcactggtatcagcagaagcctggcaaggcccctaagctgctgatctacagcgccagcaatctggagaccggcgtgcctagcagattcagcggcagcggctccggcacctacttcaccctgaccatcagcagcctgctgcctgaggatttcgccacctactactgccagcaggtggtgtggagacctttcaccttcggccagggcaccaaggtggagatcaagcgggtggagcccaagagcagcgataagacccacacctgccccccctgccctgcccccgagctgctgggcggacccagcgtgttcctgttcccccccaagcctaaggacaccctgatgatcagcagaacccccgaggtgacctgcgtggtggtggatgtgagccacgaggaccctgaggtgaagttcaactggtacgtggacggcgtggaggtgcacaatgccaagaccaagcccagggaggagcagtacaacagcacctaccgggtggtgtccgtgctgaccgtgctgcaccaggattggctgaacggcaaggagtacaagtgcaaggtgtccaacaaggccctgcctgcccctatcgagaaaaccatcagcaaggccaagggccagcccagagagccccaggtgtacaccctgccccctagcagagatgagctgaccaagaaccaggtgtccctgacctgcctggtgaagggcttctaccccagcgacatcgccgtggagtgggagagcaacggccagcccgagaacaactacaagaccaccccccctgtgctggacagcgatggcagcttcttcctgtacagcaagctgaccgtggacaagagcagatggcagcagggcaacgtgttcagctgcagcgtgatgcacgaggccctgcacaatcactacacccagaagagcctgagcctgtcccctggcaagtga

SEQ ID NO: 454 - DNA, 1026 bp, Artificial Sequence
  Synthetic
gacatccagatgacccagagccccagcagcctgagcgcctctgtgggcgatagagtgaccatcacctgcagagccagccaggccatcgacagctacctgcactggtatcagcagaagcctggcaaggcccctaagctgctgatctacagcgccagcaatctggagaccggcgtgcctagcagattcagcggcagcggctccggcacccagttcaccctgaccatcagcagcctgctgcctgaggatttcgccacctactactgccagcaggtggtgtggagacctttcaccttcggccagggcaccaaggtggagatcaagcgggtggagcccaagagcagcgataagacccacacctgccccccctgccctgcccccgagctgctgggcggacccagcgtgttcctgttcccccccaagcctaaggacaccctgatgatcagcagaacccccgaggtgacctgcgtggtggtggatgtgagccacgaggaccctgaggtgaagttcaactggtacgtggacggcgtggaggtgcacaatgccaagaccaagcccagggaggagcagtacaacagcacctaccgggtggtgtccgtgctgaccgtgctgcaccaggattggctgaacggcaaggagtacaagtgcaaggtgtccaacaaggccctgcctgcccctatcgagaaaaccatcagcaaggccaagggccagcccagagagccccaggtgtacaccctgccccctagcagagatgagctgaccaagaaccaggtgtccctgacctgcctggtgaagggcttctaccccagcgacatcgccgtggagtgggagagcaacggccagcccgagaacaactacaagaccaccccccctgtgctggacagcgatggcagcttcttcctgtacagcaagctgaccgtggacaagagcagatggcagcagggcaacgtgttcagctgcagcgtgatgcacgaggccctgcacaatcactacacccagaagagcctgagcctgtcccctggcaagtga

SEQ ID NO: 455 - DNA, 1026 bp, Artificial Sequence
  Synthetic
gacatccagatgacccagagccccagcagcctgagcgcctctgtgggcgatagagtgaccatcacctgcagagccagccaggccatcgacagctacctgcactggtatcagcagaagcctggcaaggcccctaagctgctgatctacagcgccagcaatctggagaccggcgtgcctagcagattcagcggcagcggctccggcacccacttcaccctgaccatcagcagcctgctgcctgaggatttcgccacctactactgccagcaggtggtgtggagacctttcaccttcggccagggcaccaaggtggagatcaagcgggtggagcccaagagcagcgataagacccacacctgccccccctgccctgcccccgagctgctgggcggacccagcgtgttcctgttcccccccaagcctaaggacaccctgatgatcagcagaacccccgaggtgacctgcgtggtggtggatgtgagccacgaggaccctgaggtgaagttcaactggtacgtggacggcgtggaggtgcacaatgccaagaccaagcccagggaggagcagtacaacagcacctaccgggtggtgtccgtgctgaccgtgctgcaccaggattggctgaacggcaaggagtacaagtgcaaggtgtccaacaaggccctgcctgcccctatcgagaaaaccatcagcaaggccaagggccagcccagagagccccaggtgtacaccctgccccctagcagagatgagctgaccaagaaccaggtgtccctgacctgcctggtgaagggcttctaccccagcgacatcgccgtggagtgggagagcaacggccagcccgagaacaactacaagaccaccccccctgtgctggacagcgatggcagcttcttcctgtacagcaagctgaccgtggacaagagcagatggcagcagggcaacgtgttcagctgcagcgtgatgcacgaggccctgcacaatcactacacccagaagagcctgagcctgtcccctggcaagtga

SEQ ID NO: 456 - DNA, 1026 bp, Artificial Sequence
  Synthetic
gacatccagatgacccagagccccagcagcctgagcgcctctgtgggcgatagagtgaccatcacctgcagagccagccaggccatcgacagctacctgcactggtatcagcagaagcctggcaaggcccctaagctgctgatctacagcgccagcaatctggagaccggcgtgcctagcagattcagcggcagcggctccggcacccccttcaccctgaccatcagcagcctgctgcctgaggatttcgccacctactactgccagcaggtggtgtggagacctttcaccttcggccagggcaccaaggtggagatcaagcgggtggagcccaagagcagcgataagacccacacctgccccccctgccctgcccccgagctgctgggcggacccagcgtgttcctgttcccccccaagcctaaggacaccctgatgatcagcagaacccccgaggtgacctgcgtggtggtggatgtgagccacgaggaccctgaggtgaagttcaactggtacgtggacggcgtggaggtgcacaatgccaagaccaagcccagggaggagcagtacaacagcacctaccgggtggtgtccgtgctgaccgtgctgcaccaggattggctgaacggcaaggagtacaagtgcaaggtgtccaacaaggccctgcctgcccctatcgagaaaaccatcagcaaggccaagggccagcccagagagccccaggtgtacaccctgccccctagcagagatgagctgaccaagaaccaggtgtccctgacctgcctggtgaagggcttctaccccagcgacatcgccgtggagtgggagagcaacggccagcccgagaacaactacaagaccaccccccctgtgctggacagcgatggcagcttcttcctgtacagcaagctgaccgtggacaagagcagatggcagcagggcaacgtgttcagctgcagcgtgatgcacgaggccctgcacaatcactacacccagaagagcctgagcctgtcccctggcaagtga

SEQ ID NO: 457 - DNA, 1026 bp, Artificial Sequence
  Synthetic
gacatccagatgacccagagccccagcagcctgagcgcctctgtgggcgatagagtgaccatcacctgcagagccagccaggccatcgacagctacctgcactggtatcagcagaagcctggcaaggcccctaagctgctgatctacagcgccagcaatctggagaccggcgtgcctagcagattcagcggcagcggctccggcaccaagttcaccctgaccatcagcagcctgctgcctgaggatttcgccacctactactgccagcaggtggtgtggagacctttcaccttcggccagggcaccaaggtggagatcaagcgggtggagcccaagagcagcgataagacccacacctgccccccctgccctgcccccgagctgctgggcggacccagcgtgttcctgttcccccccaagcctaaggacaccctgatgatcagcagaacccccgaggtgacctgcgtggtggtggatgtgagccacgaggaccctgaggtgaagttcaactggtacgtggacggcgtggaggtgcacaatgccaagaccaagcccagggaggagcagtacaacagcacctaccgggtggtgtccgtgctgaccgtgctgcaccaggattggctgaacggcaaggagtacaagtgcaaggtgtccaacaaggccctgcctgcccctatcgagaaaaccatcagcaaggccaagggccagcccagagagccccaggtgtacaccctgccccctagcagagatgagctgaccaagaaccaggtgtccctgacctgcctggtgaagggcttctaccccagcgacatcgccgtggagtgggagagcaacggccagcccgagaacaactacaagaccaccccccctgtgctggacagcgatggcagcttcttcctgtacagcaagctgaccgtggacaagagcagatggcagcagggcaacgtgttcagctgcagcgtgatgcacgaggccctgcacaatcactacacccagaagagcctgagcctgtcccctggcaagtga

SEQ ID NO: 458 - DNA, 1026 bp, Artificial Sequence
  Synthetic
gacatccagatgacccagagccccagcagcctgagcgcctctgtgggcgatagagtgaccatcacctgcagagccagccaggccatcgacagctacctgcactggtatcagcagaagcctggcaaggcccctaagctgctgatctacagcgccagcaatctggagaccggcgtgcctagcagattcagcggcagcggctccggcaccgacagcaccctgaccatcagcagcctgctgcctgaggatttcgccacctactactgccagcaggtggtgtggagacctttcaccttcggccagggcaccaaggtggagatcaagcgggtggagcccaagagcagcgataagacccacacctgccccccctgccctgcccccgagctgctgggcggacccagcgtgttcctgttcccccccaagcctaaggacaccctgatgatcagcagaacccccgaggtgacctgcgtggtggtggatgtgagccacgaggaccctgaggtgaagttcaactggtacgtggacggcgtggaggtgcacaatgccaagaccaagcccagggaggagcagtacaacagcacctaccgggtggtgtccgtgctgaccgtgctgcaccaggattggctgaacggcaaggagtacaagtgcaaggtgtccaacaaggccctgcctgcccctatcgagaaaaccatcagcaaggccaagggccagcccagagagccccaggtgtacaccctgccccctagcagagatgagctgaccaagaaccaggtgtccctgacctgcctggtgaagggcttctaccccagcgacatcgccgtggagtgggagagcaacggccagcccgagaacaactacaagaccaccccccctgtgctggacagcgatggcagcttcttcctgtacagcaagctgaccgtggacaagagcagatggcagcagggcaacgtgttcagctgcagcgtgatgcacgaggccctgcacaatcactacacccagaagagcctgagcctgtcccctggcaagtga

SEQ ID NO: 459 - DNA, 1026 bp, Artificial Sequence
  Synthetic
gacatccagatgacccagagccccagcagcctgagcgcctctgtgggcgatagagtgaccatcacctgcagagccagccaggccatcgacagctacctgcactggtatcagcagaagcctggcaaggcccctaagctgctgatctacagcgccagcaatctggagaccggcgtgcctagcagattcagcggcagcggctccggcaccgacctgaccctgaccatcagcagcctgctgcctgaggatttcgccacctactactgccagcaggtggtgtggagacctttcaccttcggccagggcaccaaggtggagatcaagcgggtggagcccaagagcagcgataagacccacacctgccccccctgccctgcccccgagctgctgggcggacccagcgtgttcctgttcccccccaagcctaaggacaccctgatgatcagcagaacccccgaggtgacctgcgtggtggtggatgtgagccacgaggaccctgaggtgaagttcaactggtacgtggacggcgtggaggtgcacaatgccaagaccaagcccagggaggagcagtacaacagcacctaccgggtggtgtccgtgctgaccgtgctgcaccaggattggctgaacggcaaggagtacaagtgcaaggtgtccaacaaggccctgcctgcccctatcgagaaaaccatcagcaaggccaagggccagcccagagagccccaggtgtacaccctgccccctagcagagatgagctgaccaagaaccaggtgtccctgacctgcctggtgaagggcttctaccccagcgacatcgccgtggagtgggagagcaacggccagcccgagaacaactacaagaccaccccccctgtgctggacagcgatggcagcttcttcctgtacagcaagctgaccgtggacaagagcagatggcagcagggcaacgtgttcagctgcagcgtgatgcacgaggccctgcacaatcactacacccagaagagcctgagcctgtcccctggcaagtga

SEQ ID NO: 460 - DNA, 1026 bp, Artificial Sequence
  Synthetic
gacatccagatgacccagagccccagcagcctgagcgcctctgtgggcgatagagtgaccatcacctgcagagccagccaggccatcgacagctacctgcactggtatcagcagaagcctggcaaggcccctaagctgctgatctacagcgccagcaatctggagaccggcgtgcctagcagattcagcggcagcggctccggcaccgactacaccctgaccatcagcagcctgctgcctgaggatttcgccacctactactgccagcaggtggtgtggagacctttcaccttcggccagggcaccaaggtggagatcaagcgggtggagcccaagagcagcgataagacccacacctgccccccctgccctgcccccgagctgctgggcggacccagcgtgttcctgttcccccccaagcctaaggacaccctgatgatcagcagaacccccgaggtgacctgcgtggtggtggatgtgagccacgaggaccctgaggtgaagttcaactggtacgtggacggcgtggaggtgcacaatgccaagaccaagcccagggaggagcagtacaacagcacctaccgggtggtgtccgtgctgaccgtgctgcaccaggattggctgaacggcaaggagtacaagtgcaaggtgtccaacaaggccctgcctgcccctatcgagaaaaccatcagcaaggccaagggccagcccagagagccccaggtgtacaccctgccccctagcagagatgagctgaccaagaaccaggtgtccctgacctgcctggtgaagggcttctaccccagcgacatcgccgtggagtgggagagcaacggccagcccgagaacaactacaagaccaccccccctgtgctggacagcgatggcagcttcttcctgtacagcaagctgaccgtggacaagagcagatggcagcagggcaacgtgttcagctgcagcgtgatgcacgaggccctgcacaatcactacacccagaagagcctgagcctgtcccctggcaagtga

SEQ ID NO: 461 - DNA, 1026 bp, Artificial Sequence
  Synthetic
gacatccagatgacccagagccccagcagcctgagcgcctctgtgggcgatagagtgaccatcacctgcagagccagccaggccatcgacagctacctgcactggtatcagcagaagcctggcaaggcccctaagctgctgatctacagcgccagcaatctggagaccggcgtgcctagcagattcagcggcagcggctccggcaccgacgacaccctgaccatcagcagcctgctgcctgaggatttcgccacctactactgccagcaggtggtgtggagacctttcaccttcggccagggcaccaaggtggagatcaagcgggtggagcccaagagcagcgataagacccacacctgccccccctgccctgcccccgagctgctgggcggacccagcgtgttcctgttcccccccaagcctaaggacaccctgatgatcagcagaacccccgaggtgacctgcgtggtggtggatgtgagccacgaggaccctgaggtgaagttcaactggtacgtggacggcgtggaggtgcacaatgccaagaccaagcccagggaggagcagtacaacagcacctaccgggtggtgtccgtgctgaccgtgctgcaccaggattggctgaacggcaaggagtacaagtgcaaggtgtccaacaaggccctgcctgcccctatcgagaaaaccatcagcaaggccaagggccagcccagagagccccaggtgtacaccctgccccctagcagagatgagctgaccaagaaccaggtgtccctgacctgcctggtgaagggcttctaccccagcgacatcgccgtggagtgggagagcaacggccagcccgagaacaactacaagaccaccccccctgtgctggacagcgatggcagcttcttcctgtacagcaagctgaccgtggacaagagcagatggcagcagggcaacgtgttcagctgcagcgtgatgcacgaggccctgcacaatcactacacccagaagagcctgagcctgtcccctggcaagtga

SEQ ID NO: 462 - DNA, 1026 bp, Artificial Sequence
  Synthetic
gacatccagatgacccagagccccagcagcctgagcgcctctgtgggcgatagagtgaccatcacctgcagagccagccaggccatcgacagctacctgcactggtatcagcagaagcctggcaaggcccctaagctgctgatctacagcgccagcaatctggagaccggcgtgcctagcagattcagcggcagcggctccggcaccgaccagaccctgaccatcagcagcctgctgcctgaggatttcgccacctactactgccagcaggtggtgtggagacctttcaccttcggccagggcaccaaggtggagatcaagcgggtggagcccaagagcagcgataagacccacacctgccccccctgccctgcccccgagctgctgggcggacccagcgtgttcctgttcccccccaagcctaaggacaccctgatgatcagcagaacccccgaggtgacctgcgtggtggtggatgtgagccacgaggaccctgaggtgaagttcaactggtacgtggacggcgtggaggtgcacaatgccaagaccaagcccagggaggagcagtacaacagcacctaccgggtggtgtccgtgctgaccgtgctgcaccaggattggctgaacggcaaggagtacaagtgcaaggtgtccaacaaggccctgcctgcccctatcgagaaaaccatcagcaaggccaagggccagcccagagagccccaggtgtacaccctgccccctagcagagatgagctgaccaagaaccaggtgtccctgacctgcctggtgaagggcttctaccccagcgacatcgccgtggagtgggagagcaacggccagcccgagaacaactacaagaccaccccccctgtgctggacagcgatggcagcttcttcctgtacagcaagctgaccgtggacaagagcagatggcagcagggcaacgtgttcagctgcagcgtgatgcacgaggccctgcacaatcactacacccagaagagcctgagcctgtcccctggcaagtga

SEQ ID NO: 463 - DNA, 1026 bp, Artificial Sequence
  Synthetic
gacatccagatgacccagagccccagcagcctgagcgcctctgtgggcgatagagtgaccatcacctgcagagccagccaggccatcgacagctacctgcactggtatcagcagaagcctggcaaggcccctaagctgctgatctacagcgccagcaatctggagaccggcgtgcctagcagattcagcggcagcggctccggcaccgaccacaccctgaccatcagcagcctgctgcctgaggatttcgccacctactactgccagcaggtggtgtggagacctttcaccttcggccagggcaccaaggtggagatcaagcgggtggagcccaagagcagcgataagacccacacctgccccccctgccctgcccccgagctgctgggcggacccagcgtgttcctgttcccccccaagcctaaggacaccctgatgatcagcagaacccccgaggtgacctgcgtggtggtggatgtgagccacgaggaccctgaggtgaagttcaactggtacgtggacggcgtggaggtgcacaatgccaagaccaagcccagggaggagcagtacaacagcacctaccgggtggtgtccgtgctgaccgtgctgcaccaggattggctgaacggcaaggagtacaagtgcaaggtgtccaacaaggccctgcctgcccctatcgagaaaaccatcagcaaggccaagggccagcccagagagccccaggtgtacaccctgccccctagcagagatgagctgaccaagaaccaggtgtccctgacctgcctggtgaagggcttctaccccagcgacatcgccgtggagtgggagagcaacggccagcccgagaacaactacaagaccaccccccctgtgctggacagcgatggcagcttcttcctgtacagcaagctgaccgtggacaagagcagatggcagcagggcaacgtgttcagctgcagcgtgatgcacgaggccctgcacaatcactacacccagaagagcctgagcctgtcccctggcaagtga

SEQ ID NO: 464 - DNA, 1026 bp, Artificial Sequence
  Synthetic
gacatccagatgacccagagccccagcagcctgagcgcctctgtgggcgatagagtgaccatcacctgcagagccagccaggccatcgacagctacctgcactggtatcagcagaagcctggcaaggcccctaagctgctgatctacagcgccagcaatctggagaccggcgtgcctagcagattcagcggcagcggctccggcaccgaccccaccctgaccatcagcagcctgctgcctgaggatttcgccacctactactgccagcaggtggtgtggagacctttcaccttcggccagggcaccaaggtggagatcaagcgggtggagcccaagagcagcgataagacccacacctgccccccctgccctgcccccgagctgctgggcggacccagcgtgttcctgttcccccccaagcctaaggacaccctgatgatcagcagaacccccgaggtgacctgcgtggtggtggatgtgagccacgaggaccctgaggtgaagttcaactggtacgtggacggcgtggaggtgcacaatgccaagaccaagcccagggaggagcagtacaacagcacctaccgggtggtgtccgtgctgaccgtgctgcaccaggattggctgaacggcaaggagtacaagtgcaaggtgtccaacaaggccctgcctgcccctatcgagaaaaccatcagcaaggccaagggccagcccagagagccccaggtgtacaccctgccccctagcagagatgagctgaccaagaaccaggtgtccctgacctgcctggtgaagggcttctaccccagcgacatcgccgtggagtgggagagcaacggccagcccgagaacaactacaagaccaccccccctgtgctggacagcgatggcagcttcttcctgtacagcaagctgaccgtggacaagagcagatggcagcagggcaacgtgttcagctgcagcgtgatgcacgaggccctgcacaatcactacacccagaagagcctgagcctgtcccctggcaagtga

SEQ ID NO: 465 - DNA, 1026 bp, Artificial Sequence
  Synthetic
gacatccagatgacccagagccccagcagcctgagcgcctctgtgggcgatagagtgaccatcacctgcagagccagccaggccatcgacagctacctgcactggtatcagcagaagcctggcaaggcccctaagctgctgatctacagcgccagcaatctggagaccggcgtgcctagcagattcagcggcagcggctccggcaccgacaagaccctgaccatcagcagcctgctgcctgaggatttcgccacctactactgccagcaggtggtgtggagacctttcaccttcggccagggcaccaaggtggagatcaagcgggtggagcccaagagcagcgataagacccacacctgccccccctgccctgcccccgagctgctgggcggacccagcgtgttcctgttcccccccaagcctaaggacaccctgatgatcagcagaacccccgaggtgacctgcgtggtggtggatgtgagccacgaggaccctgaggtgaagttcaactggtacgtggacggcgtggaggtgcacaatgccaagaccaagcccagggaggagcagtacaacagcacctaccgggtggtgtccgtgctgaccgtgctgcaccaggattggctgaacggcaaggagtacaagtgcaaggtgtccaacaaggccctgcctgcccctatcgagaaaaccatcagcaaggccaagggccagcccagagagccccaggtgtacaccctgccccctagcagagatgagctgaccaagaaccaggtgtccctgacctgcctggtgaagggcttctaccccagcgacatcgccgtggagtgggagagcaacggccagcccgagaacaactacaagaccaccccccctgtgctggacagcgatggcagcttcttcctgtacagcaagctgaccgtggacaagagcagatggcagcagggcaacgtgttcagctgcagcgtgatgcacgaggccctgcacaatcactacacccagaagagcctgagcctgtcccctggcaagtga

SEQ ID NO: 466 - DNA, 1026 bp, Artificial Sequence
  Synthetic
gacatccagatgacccagagccccagcagcctgagcgcctctgtgggcgatagagtgaccatcacctgcagagccagccaggccatcgacagctacctgcactggtatcagcagaagcctggcaaggcccctaagctgctgatctacagcgccagcaatctggagaccggcgtgcctagcagattcagcggcagcggctccggcaccgacttcctgctgaccatcagcagcctgctgcctgaggatttcgccacctactactgccagcaggtggtgtggagacctttcaccttcggccagggcaccaaggtggagatcaagcgggtggagcccaagagcagcgataagacccacacctgccccccctgccctgcccccgagctgctgggcggacccagcgtgttcctgttcccccccaagcctaaggacaccctgatgatcagcagaacccccgaggtgacctgcgtggtggtggatgtgagccacgaggaccctgaggtgaagttcaactggtacgtggacggcgtggaggtgcacaatgccaagaccaagcccagggaggagcagtacaacagcacctaccgggtggtgtccgtgctgaccgtgctgcaccaggattggctgaacggcaaggagtacaagtgcaaggtgtccaacaaggccctgcctgcccctatcgagaaaaccatcagcaaggccaagggccagcccagagagccccaggtgtacaccctgccccctagcagagatgagctgaccaagaaccaggtgtccctgacctgcctggtgaagggcttctaccccagcgacatcgccgtggagtgggagagcaacggccagcccgagaacaactacaagaccaccccccctgtgctggacagcgatggcagcttcttcctgtacagcaagctgaccgtggacaagagcagatggcagcagggcaacgtgttcagctgcagcgtgatgcacgaggccctgcacaatcactacacccagaagagcctgagcctgtcccctggcaagtga

SEQ ID NO: 467 - DNA, 1026 bp, Artificial Sequence
  Synthetic
gacatccagatgacccagagccccagcagcctgagcgcctctgtgggcgatagagtgaccatcacctgcagagccagccaggccatcgacagctacctgcactggtatcagcagaagcctggcaaggcccctaagctgctgatctacagcgccagcaatctggagaccggcgtgcctagcagattcagcggcagcggctccggcaccgacttctacctgaccatcagcagcctgctgcctgaggatttcgccacctactactgccagcaggtggtgtggagacctttcaccttcggccagggcaccaaggtggagatcaagcgggtggagcccaagagcagcgataagacccacacctgccccccctgccctgcccccgagctgctgggcggacccagcgtgttcctgttcccccccaagcctaaggacaccctgatgatcagcagaacccccgaggtgacctgcgtggtggtggatgtgagccacgaggaccctgaggtgaagttcaactggtacgtggacggcgtggaggtgcacaatgccaagaccaagcccagggaggagcagtacaacagcacctaccgggtggtgtccgtgctgaccgtgctgcaccaggattggctgaacggcaaggagtacaagtgcaaggtgtccaacaaggccctgcctgcccctatcgagaaaaccatcagcaaggccaagggccagcccagagagccccaggtgtacaccctgccccctagcagagatgagctgaccaagaaccaggtgtccctgacctgcctggtgaagggcttctaccccagcgacatcgccgtggagtgggagagcaacggccagcccgagaacaactacaagaccaccccccctgtgctggacagcgatggcagcttcttcctgtacagcaagctgaccgtggacaagagcagatggcagcagggcaacgtgttcagctgcagcgtgatgcacgaggccctgcacaatcactacacccagaagagcctgagcctgtcccctggcaagtga

SEQ ID NO: 468 - DNA, 1026 bp, Artificial Sequence
  Synthetic
gacatccagatgacccagagccccagcagcctgagcgcctctgtgggcgatagagtgaccatcacctgcagagccagccaggccatcgacagctacctgcactggtatcagcagaagcctggcaaggcccctaagctgctgatctacagcgccagcaatctggagaccggcgtgcctagcagattcagcggcagcggctccggcaccgacttcgacctgaccatcagcagcctgctgcctgaggatttcgccacctactactgccagcaggtggtgtggagacctttcaccttcggccagggcaccaaggtggagatcaagcgggtggagcccaagagcagcgataagacccacacctgccccccctgccctgcccccgagctgctgggcggacccagcgtgttcctgttcccccccaagcctaaggacaccctgatgatcagcagaacccccgaggtgacctgcgtggtggtggatgtgagccacgaggaccctgaggtgaagttcaactggtacgtggacggcgtggaggtgcacaatgccaagaccaagcccagggaggagcagtacaacagcacctaccgggtggtgtccgtgctgaccgtgctgcaccaggattggctgaacggcaaggagtacaagtgcaaggtgtccaacaaggccctgcctgcccctatcgagaaaaccatcagcaaggccaagggccagcccagagagccccaggtgtacaccctgccccctagcagagatgagctgaccaagaaccaggtgtccctgacctgcctggtgaagggcttctaccccagcgacatcgccgtggagtgggagagcaacggccagcccgagaacaactacaagaccaccccccctgtgctggacagcgatggcagcttcttcctgtacagcaagctgaccgtggacaagagcagatggcagcagggcaacgtgttcagctgcagcgtgatgcacgaggccctgcacaatcactacacccagaagagcctgagcctgtcccctggcaagtga

SEQ ID NO: 469 - DNA, 1026 bp, Artificial Sequence
  Synthetic
gacatccagatgacccagagccccagcagcctgagcgcctctgtgggcgatagagtgaccatcacctgcagagccagccaggccatcgacagctacctgcactggtatcagcagaagcctggcaaggcccctaagctgctgatctacagcgccagcaatctggagaccggcgtgcctagcagattcagcggcagcggctccggcaccgacttccagctgaccatcagcagcctgctgcctgaggatttcgccacctactactgccagcaggtggtgtggagacctttcaccttcggccagggcaccaaggtggagatcaagcgggtggagcccaagagcagcgataagacccacacctgccccccctgccctgcccccgagctgctgggcggacccagcgtgttcctgttcccccccaagcctaaggacaccctgatgatcagcagaacccccgaggtgacctgcgtggtggtggatgtgagccacgaggaccctgaggtgaagttcaactggtacgtggacggcgtggaggtgcacaatgccaagaccaagcccagggaggagcagtacaacagcacctaccgggtggtgtccgtgctgaccgtgctgcaccaggattggctgaacggcaaggagtacaagtgcaaggtgtccaacaaggccctgcctgcccctatcgagaaaaccatcagcaaggccaagggccagcccagagagccccaggtgtacaccctgccccctagcagagatgagctgaccaagaaccaggtgtccctgacctgcctggtgaagggcttctaccccagcgacatcgccgtggagtgggagagcaacggccagcccgagaacaactacaagaccaccccccctgtgctggacagcgatggcagcttcttcctgtacagcaagctgaccgtggacaagagcagatggcagcagggcaacgtgttcagctgcagcgtgatgcacgaggccctgcacaatcactacacccagaagagcctgagcctgtcccctggcaagtga

SEQ ID NO: 470 - DNA, 1026 bp, Artificial Sequence
  Synthetic
gacatccagatgacccagagccccagcagcctgagcgcctctgtgggcgatagagtgaccatcacctgcagagccagccaggccatcgacagctacctgcactggtatcagcagaagcctggcaaggcccctaagctgctgatctacagcgccagcaatctggagaccggcgtgcctagcagattcagcggcagcggctccggcaccgacttccacctgaccatcagcagcctgctgcctgaggatttcgccacctactactgccagcaggtggtgtggagacctttcaccttcggccagggcaccaaggtggagatcaagcgggtggagcccaagagcagcgataagacccacacctgccccccctgccctgcccccgagctgctgggcggacccagcgtgttcctgttcccccccaagcctaaggacaccctgatgatcagcagaacccccgaggtgacctgcgtggtggtggatgtgagccacgaggaccctgaggtgaagttcaactggtacgtggacggcgtggaggtgcacaatgccaagaccaagcccagggaggagcagtacaacagcacctaccgggtggtgtccgtgctgaccgtgctgcaccaggattggctgaacggcaaggagtacaagtgcaaggtgtccaacaaggccctgcctgcccctatcgagaaaaccatcagcaaggccaagggccagcccagagagccccaggtgtacaccctgccccctagcagagatgagctgaccaagaaccaggtgtccctgacctgcctggtgaagggcttctaccccagcgacatcgccgtggagtgggagagcaacggccagcccgagaacaactacaagaccaccccccctgtgctggacagcgatggcagcttcttcctgtacagcaagctgaccgtggacaagagcagatggcagcagggcaacgtgttcagctgcagcgtgatgcacgaggccctgcacaatcactacacccagaagagcctgagcctgtcccctggcaagtga

SEQ ID NO: 471 - DNA, 1026 bp, Artificial Sequence
  Synthetic
gacatccagatgacccagagccccagcagcctgagcgcctctgtgggcgatagagtgaccatcacctgcagagccagccaggccatcgacagctacctgcactggtatcagcagaagcctggcaaggcccctaagctgctgatctacagcgccagcaatctggagaccggcgtgcctagcagattcagcggcagcggctccggcaccgacttccccctgaccatcagcagcctgctgcctgaggatttcgccacctactactgccagcaggtggtgtggagacctttcaccttcggccagggcaccaaggtggagatcaagcgggtggagcccaagagcagcgataagacccacacctgccccccctgccctgcccccgagctgctgggcggacccagcgtgttcctgttcccccccaagcctaaggacaccctgatgatcagcagaacccccgaggtgacctgcgtggtggtggatgtgagccacgaggaccctgaggtgaagttcaactggtacgtggacggcgtggaggtgcacaatgccaagaccaagcccagggaggagcagtacaacagcacctaccgggtggtgtccgtgctgaccgtgctgcaccaggattggctgaacggcaaggagtacaagtgcaaggtgtccaacaaggccctgcctgcccctatcgagaaaaccatcagcaaggccaagggccagcccagagagccccaggtgtacaccctgccccctagcagagatgagctgaccaagaaccaggtgtccctgacctgcctggtgaagggcttctaccccagcgacatcgccgtggagtgggagagcaacggccagcccgagaacaactacaagaccaccccccctgtgctggacagcgatggcagcttcttcctgtacagcaagctgaccgtggacaagagcagatggcagcagggcaacgtgttcagctgcagcgtgatgcacgaggccctgcacaatcactacacccagaagagcctgagcctgtcccctggcaagtga

SEQ ID NO: 472 - DNA, 1026 bp, Artificial Sequence
  Synthetic
gacatccagatgacccagagccccagcagcctgagcgcctctgtgggcgatagagtgaccatcacctgcagagccagccaggccatcgacagctacctgcactggtatcagcagaagcctggcaaggcccctaagctgctgatctacagcgccagcaatctggagaccggcgtgcctagcagattcagcggcagcggctccggcaccgacttcaagctgaccatcagcagcctgctgcctgaggatttcgccacctactactgccagcaggtggtgtggagacctttcaccttcggccagggcaccaaggtggagatcaagcgggtggagcccaagagcagcgataagacccacacctgccccccctgccctgcccccgagctgctgggcggacccagcgtgttcctgttcccccccaagcctaaggacaccctgatgatcagcagaacccccgaggtgacctgcgtggtggtggatgtgagccacgaggaccctgaggtgaagttcaactggtacgtggacggcgtggaggtgcacaatgccaagaccaagcccagggaggagcagtacaacagcacctaccgggtggtgtccgtgctgaccgtgctgcaccaggattggctgaacggcaaggagtacaagtgcaaggtgtccaacaaggccctgcctgcccctatcgagaaaaccatcagcaaggccaagggccagcccagagagccccaggtgtacaccctgccccctagcagagatgagctgaccaagaaccaggtgtccctgacctgcctggtgaagggcttctaccccagcgacatcgccgtggagtgggagagcaacggccagcccgagaacaactacaagaccaccccccctgtgctggacagcgatggcagcttcttcctgtacagcaagctgaccgtggacaagagcagatggcagcagggcaacgtgttcagctgcagcgtgatgcacgaggccctgcacaatcactacacccagaagagcctgagcctgtcccctggcaagtga

SEQ ID NO: 473 - DNA, 1026 bp, Artificial Sequence
  Synthetic
gacatccagatgacccagagccccagcagcctgagcgcctctgtgggcgatagagtgaccatcacctgcagagccagccaggccatcgacagctacctgcactggtatcagcagaagcctggcaaggcccctaagctgctgatctacagcgccagcaatctggagaccggcgtgcctagcagattcagcggcagcggctccggcaccgacttcaccagcaccatcagcagcctgctgcctgaggatttcgccacctactactgccagcaggtggtgtggagacctttcaccttcggccagggcaccaaggtggagatcaagcgggtggagcccaagagcagcgataagacccacacctgccccccctgccctgcccccgagctgctgggcggacccagcgtgttcctgttcccccccaagcctaaggacaccctgatgatcagcagaacccccgaggtgacctgcgtggtggtggatgtgagccacgaggaccctgaggtgaagttcaactggtacgtggacggcgtggaggtgcacaatgccaagaccaagcccagggaggagcagtacaacagcacctaccgggtggtgtccgtgctgaccgtgctgcaccaggattggctgaacggcaaggagtacaagtgcaaggtgtccaacaaggccctgcctgcccctatcgagaaaaccatcagcaaggccaagggccagcccagagagccccaggtgtacaccctgccccctagcagagatgagctgaccaagaaccaggtgtccctgacctgcctggtgaagggcttctaccccagcgacatcgccgtggagtgggagagcaacggccagcccgagaacaactacaagaccaccccccctgtgctggacagcgatggcagcttcttcctgtacagcaagctgaccgtggacaagagcagatggcagcagggcaacgtgttcagctgcagcgtgatgcacgaggccctgcacaatcactacacccagaagagcctgagcctgtcccctggcaagtga

SEQ ID NO: 474 - DNA, 1026 bp, Artificial Sequence
  Synthetic
gacatccagatgacccagagccccagcagcctgagcgcctctgtgggcgatagagtgaccatcacctgcagagccagccaggccatcgacagctacctgcactggtatcagcagaagcctggcaaggcccctaagctgctgatctacagcgccagcaatctggagaccggcgtgcctagcagattcagcggcagcggctccggcaccgacttcacctacaccatcagcagcctgctgcctgaggatttcgccacctactactgccagcaggtggtgtggagacctttcaccttcggccagggcaccaaggtggagatcaagcgggtggagcccaagagcagcgataagacccacacctgccccccctgccctgcccccgagctgctgggcggacccagcgtgttcctgttcccccccaagcctaaggacaccctgatgatcagcagaacccccgaggtgacctgcgtggtggtggatgtgagccacgaggaccctgaggtgaagttcaactggtacgtggacggcgtggaggtgcacaatgccaagaccaagcccagggaggagcagtacaacagcacctaccgggtggtgtccgtgctgaccgtgctgcaccaggattggctgaacggcaaggagtacaagtgcaaggtgtccaacaaggccctgcctgcccctatcgagaaaaccatcagcaaggccaagggccagcccagagagccccaggtgtacaccctgccccctagcagagatgagctgaccaagaaccaggtgtccctgacctgcctggtgaagggcttctaccccagcgacatcgccgtggagtgggagagcaacggccagcccgagaacaactacaagaccaccccccctgtgctggacagcgatggcagcttcttcctgtacagcaagctgaccgtggacaagagcagatggcagcagggcaacgtgttcagctgcagcgtgatgcacgaggccctgcacaatcactacacccagaagagcctgagcctgtcccctggcaagtga

SEQ ID NO: 475 - DNA, 1026 bp, Artificial Sequence
  Synthetic
gacatccagatgacccagagccccagcagcctgagcgcctctgtgggcgatagagtgaccatcacctgcagagccagccaggccatcgacagctacctgcactggtatcagcagaagcctggcaaggcccctaagctgctgatctacagcgccagcaatctggagaccggcgtgcctagcagattcagcggcagcggctccggcaccgacttcaccgacaccatcagcagcctgctgcctgaggatttcgccacctactactgccagcaggtggtgtggagacctttcaccttcggccagggcaccaaggtggagatcaagcgggtggagcccaagagcagcgataagacccacacctgccccccctgccctgcccccgagctgctgggcggacccagcgtgttcctgttcccccccaagcctaaggacaccctgatgatcagcagaacccccgaggtgacctgcgtggtggtggatgtgagccacgaggaccctgaggtgaagttcaactggtacgtggacggcgtggaggtgcacaatgccaagaccaagcccagggaggagcagtacaacagcacctaccgggtggtgtccgtgctgaccgtgctgcaccaggattggctgaacggcaaggagtacaagtgcaaggtgtccaacaaggccctgcctgcccctatcgagaaaaccatcagcaaggccaagggccagcccagagagccccaggtgtacaccctgccccctagcagagatgagctgaccaagaaccaggtgtccctgacctgcctggtgaagggcttctaccccagcgacatcgccgtggagtgggagagcaacggccagcccgagaacaactacaagaccaccccccctgtgctggacagcgatggcagcttcttcctgtacagcaagctgaccgtggacaagagcagatggcagcagggcaacgtgttcagctgcagcgtgatgcacgaggccctgcacaatcactacacccagaagagcctgagcctgtcccctggcaagtga

SEQ ID NO: 476 - DNA, 1026 bp, Artificial Sequence
  Synthetic
gacatccagatgacccagagccccagcagcctgagcgcctctgtgggcgatagagtgaccatcacctgcagagccagccaggccatcgacagctacctgcactggtatcagcagaagcctggcaaggcccctaagctgctgatctacagcgccagcaatctggagaccggcgtgcctagcagattcagcggcagcggctccggcaccgacttcacccagaccatcagcagcctgctgcctgaggatttcgccacctactactgccagcaggtggtgtggagacctttcaccttcggccagggcaccaaggtggagatcaagcgggtggagcccaagagcagcgataagacccacacctgccccccctgccctgcccccgagctgctgggcggacccagcgtgttcctgttcccccccaagcctaaggacaccctgatgatcagcagaacccccgaggtgacctgcgtggtggtggatgtgagccacgaggaccctgaggtgaagttcaactggtacgtggacggcgtggaggtgcacaatgccaagaccaagcccagggaggagcagtacaacagcacctaccgggtggtgtccgtgctgaccgtgctgcaccaggattggctgaacggcaaggagtacaagtgcaaggtgtccaacaaggccctgcctgcccctatcgagaaaaccatcagcaaggccaagggccagcccagagagccccaggtgtacaccctgccccctagcagagatgagctgaccaagaaccaggtgtccctgacctgcctggtgaagggcttctaccccagcgacatcgccgtggagtgggagagcaacggccagcccgagaacaactacaagaccaccccccctgtgctggacagcgatggcagcttcttcctgtacagcaagctgaccgtggacaagagcagatggcagcagggcaacgtgttcagctgcagcgtgatgcacgaggccctgcacaatcactacacccagaagagcctgagcctgtcccctggcaagtga

SEQ ID NO: 477 - DNA, 1026 bp, Artificial Sequence
  Synthetic
gacatccagatgacccagagccccagcagcctgagcgcctctgtgggcgatagagtgaccatcacctgcagagccagccaggccatcgacagctacctgcactggtatcagcagaagcctggcaaggcccctaagctgctgatctacagcgccagcaatctggagaccggcgtgcctagcagattcagcggcagcggctccggcaccgacttcacccacaccatcagcagcctgctgcctgaggatttcgccacctactactgccagcaggtggtgtggagacctttcaccttcggccagggcaccaaggtggagatcaagcgggtggagcccaagagcagcgataagacccacacctgccccccctgccctgcccccgagctgctgggcggacccagcgtgttcctgttcccccccaagcctaaggacaccctgatgatcagcagaacccccgaggtgacctgcgtggtggtggatgtgagccacgaggaccctgaggtgaagttcaactggtacgtggacggcgtggaggtgcacaatgccaagaccaagcccagggaggagcagtacaacagcacctaccgggtggtgtccgtgctgaccgtgctgcaccaggattggctgaacggcaaggagtacaagtgcaaggtgtccaacaaggccctgcctgcccctatcgagaaaaccatcagcaaggccaagggccagcccagagagccccaggtgtacaccctgccccctagcagagatgagctgaccaagaaccaggtgtccctgacctgcctggtgaagggcttctaccccagcgacatcgccgtggagtgggagagcaacggccagcccgagaacaactacaagaccaccccccctgtgctggacagcgatggcagcttcttcctgtacagcaagctgaccgtggacaagagcagatggcagcagggcaacgtgttcagctgcagcgtgatgcacgaggccctgcacaatcactacacccagaagagcctgagcctgtcccctggcaagtga

SEQ ID NO: 478 - DNA, 1026 bp, Artificial Sequence
  Synthetic
gacatccagatgacccagagccccagcagcctgagcgcctctgtgggcgatagagtgaccatcacctgcagagccagccaggccatcgacagctacctgcactggtatcagcagaagcctggcaaggcccctaagctgctgatctacagcgccagcaatctggagaccggcgtgcctagcagattcagcggcagcggctccggcaccgacttcacccccaccatcagcagcctgctgcctgaggatttcgccacctactactgccagcaggtggtgtggagacctttcaccttcggccagggcaccaaggtggagatcaagcgggtggagcccaagagcagcgataagacccacacctgccccccctgccctgcccccgagctgctgggcggacccagcgtgttcctgttcccccccaagcctaaggacaccctgatgatcagcagaacccccgaggtgacctgcgtggtggtggatgtgagccacgaggaccctgaggtgaagttcaactggtacgtggacggcgtggaggtgcacaatgccaagaccaagcccagggaggagcagtacaacagcacctaccgggtggtgtccgtgctgaccgtgctgcaccaggattggctgaacggcaaggagtacaagtgcaaggtgtccaacaaggccctgcctgcccctatcgagaaaaccatcagcaaggccaagggccagcccagagagccccaggtgtacaccctgccccctagcagagatgagctgaccaagaaccaggtgtccctgacctgcctggtgaagggcttctaccccagcgacatcgccgtggagtgggagagcaacggccagcccgagaacaactacaagaccaccccccctgtgctggacagcgatggcagcttcttcctgtacagcaagctgaccgtggacaagagcagatggcagcagggcaacgtgttcagctgcagcgtgatgcacgaggccctgcacaatcactacacccagaagagcctgagcctgtcccctggcaagtga

SEQ ID NO: 479 - DNA, 1026 bp, Artificial Sequence
  Synthetic
gacatccagatgacccagagccccagcagcctgagcgcctctgtgggcgatagagtgaccatcacctgcagagccagccaggccatcgacagctacctgcactggtatcagcagaagcctggcaaggcccctaagctgctgatctacagcgccagcaatctggagaccggcgtgcctagcagattcagcggcagcggctccggcaccgacttcaccaagaccatcagcagcctgctgcctgaggatttcgccacctactactgccagcaggtggtgtggagacctttcaccttcggccagggcaccaaggtggagatcaagcgggtggagcccaagagcagcgataagacccacacctgccccccctgccctgcccccgagctgctgggcggacccagcgtgttcctgttcccccccaagcctaaggacaccctgatgatcagcagaacccccgaggtgacctgcgtggtggtggatgtgagccacgaggaccctgaggtgaagttcaactggtacgtggacggcgtggaggtgcacaatgccaagaccaagcccagggaggagcagtacaacagcacctaccgggtggtgtccgtgctgaccgtgctgcaccaggattggctgaacggcaaggagtacaagtgcaaggtgtccaacaaggccctgcctgcccctatcgagaaaaccatcagcaaggccaagggccagcccagagagccccaggtgtacaccctgccccctagcagagatgagctgaccaagaaccaggtgtccctgacctgcctggtgaagggcttctaccccagcgacatcgccgtggagtgggagagcaacggccagcccgagaacaactacaagaccaccccccctgtgctggacagcgatggcagcttcttcctgtacagcaagctgaccgtggacaagagcagatggcagcagggcaacgtgttcagctgcagcgtgatgcacgaggccctgcacaatcactacacccagaagagcctgagcctgtcccctggcaagtga

SEQ ID NO: 480 - DNA, 1026 bp, Artificial Sequence
  Synthetic
gacatccagatgacccagagccccagcagcctgagcgcctctgtgggcgatagagtgaccatcacctgcagagccagccaggccatcgacagctacctgcactggtatcagcagaagcctggcaaggcccctaagctgctgatctacagcgccagcaatctggagaccggcgtgcctagcagattcagcggcagcggctccggcaccgacttcaccctgctgatcagcagcctgctgcctgaggatttcgccacctactactgccagcaggtggtgtggagacctttcaccttcggccagggcaccaaggtggagatcaagcgggtggagcccaagagcagcgataagacccacacctgccccccctgccctgcccccgagctgctgggcggacccagcgtgttcctgttcccccccaagcctaaggacaccctgatgatcagcagaacccccgaggtgacctgcgtggtggtggatgtgagccacgaggaccctgaggtgaagttcaactggtacgtggacggcgtggaggtgcacaatgccaagaccaagcccagggaggagcagtacaacagcacctaccgggtggtgtccgtgctgaccgtgctgcaccaggattggctgaacggcaaggagtacaagtgcaaggtgtccaacaaggccctgcctgcccctatcgagaaaaccatcagcaaggccaagggccagcccagagagccccaggtgtacaccctgccccctagcagagatgagctgaccaagaaccaggtgtccctgacctgcctggtgaagggcttctaccccagcgacatcgccgtggagtgggagagcaacggccagcccgagaacaactacaagaccaccccccctgtgctggacagcgatggcagcttcttcctgtacagcaagctgaccgtggacaagagcagatggcagcagggcaacgtgttcagctgcagcgtgatgcacgaggccctgcacaatcactacacccagaagagcctgagcctgtcccctggcaagtga

SEQ ID NO: 481 - DNA, 1026 bp, Artificial Sequence
  Synthetic
gacatccagatgacccagagccccagcagcctgagcgcctctgtgggcgatagagtgaccatcacctgcagagccagccaggccatcgacagctacctgcactggtatcagcagaagcctggcaaggcccctaagctgctgatctacagcgccagcaatctggagaccggcgtgcctagcagattcagcggcagcggctccggcaccgacttcaccctgtacatcagcagcctgctgcctgaggatttcgccacctactactgccagcaggtggtgtggagacctttcaccttcggccagggcaccaaggtggagatcaagcgggtggagcccaagagcagcgataagacccacacctgccccccctgccctgcccccgagctgctgggcggacccagcgtgttcctgttcccccccaagcctaaggacaccctgatgatcagcagaacccccgaggtgacctgcgtggtggtggatgtgagccacgaggaccctgaggtgaagttcaactggtacgtggacggcgtggaggtgcacaatgccaagaccaagcccagggaggagcagtacaacagcacctaccgggtggtgtccgtgctgaccgtgctgcaccaggattggctgaacggcaaggagtacaagtgcaaggtgtccaacaaggccctgcctgcccctatcgagaaaaccatcagcaaggccaagggccagcccagagagccccaggtgtacaccctgccccctagcagagatgagctgaccaagaaccaggtgtccctgacctgcctggtgaagggcttctaccccagcgacatcgccgtggagtgggagagcaacggccagcccgagaacaactacaagaccaccccccctgtgctggacagcgatggcagcttcttcctgtacagcaagctgaccgtggacaagagcagatggcagcagggcaacgtgttcagctgcagcgtgatgcacgaggccctgcacaatcactacacccagaagagcctgagcctgtcccctggcaagtga

SEQ ID NO: 482 - DNA, 1026 bp, Artificial Sequence
  Synthetic
gacatccagatgacccagagccccagcagcctgagcgcctctgtgggcgatagagtgaccatcacctgcagagccagccaggccatcgacagctacctgcactggtatcagcagaagcctggcaaggcccctaagctgctgatctacagcgccagcaatctggagaccggcgtgcctagcagattcagcggcagcggctccggcaccgacttcaccctggacatcagcagcctgctgcctgaggatttcgccacctactactgccagcaggtggtgtggagacctttcaccttcggccagggcaccaaggtggagatcaagcgggtggagcccaagagcagcgataagacccacacctgccccccctgccctgcccccgagctgctgggcggacccagcgtgttcctgttcccccccaagcctaaggacaccctgatgatcagcagaacccccgaggtgacctgcgtggtggtggatgtgagccacgaggaccctgaggtgaagttcaactggtacgtggacggcgtggaggtgcacaatgccaagaccaagcccagggaggagcagtacaacagcacctaccgggtggtgtccgtgctgaccgtgctgcaccaggattggctgaacggcaaggagtacaagtgcaaggtgtccaacaaggccctgcctgcccctatcgagaaaaccatcagcaaggccaagggccagcccagagagccccaggtgtacaccctgccccctagcagagatgagctgaccaagaaccaggtgtccctgacctgcctggtgaagggcttctaccccagcgacatcgccgtggagtgggagagcaacggccagcccgagaacaactacaagaccaccccccctgtgctggacagcgatggcagcttcttcctgtacagcaagctgaccgtggacaagagcagatggcagcagggcaacgtgttcagctgcagcgtgatgcacgaggccctgcacaatcactacacccagaagagcctgagcctgtcccctggcaagtga

SEQ ID NO: 483 - DNA, 1026 bp, Artificial Sequence
  Synthetic
gacatccagatgacccagagccccagcagcctgagcgcctctgtgggcgatagagtgaccatcacctgcagagccagccaggccatcgacagctacctgcactggtatcagcagaagcctggcaaggcccctaagctgctgatctacagcgccagcaatctggagaccggcgtgcctagcagattcagcggcagcggctccggcaccgacttcaccctgcagatcagcagcctgctgcctgaggatttcgccacctactactgccagcaggtggtgtggagacctttcaccttcggccagggcaccaaggtggagatcaagcgggtggagcccaagagcagcgataagacccacacctgccccccctgccctgcccccgagctgctgggcggacccagcgtgttcctgttcccccccaagcctaaggacaccctgatgatcagcagaacccccgaggtgacctgcgtggtggtggatgtgagccacgaggaccctgaggtgaagttcaactggtacgtggacggcgtggaggtgcacaatgccaagaccaagcccagggaggagcagtacaacagcacctaccgggtggtgtccgtgctgaccgtgctgcaccaggattggctgaacggcaaggagtacaagtgcaaggtgtccaacaaggccctgcctgcccctatcgagaaaaccatcagcaaggccaagggccagcccagagagccccaggtgtacaccctgccccctagcagagatgagctgaccaagaaccaggtgtccctgacctgcctggtgaagggcttctaccccagcgacatcgccgtggagtgggagagcaacggccagcccgagaacaactacaagaccaccccccctgtgctggacagcgatggcagcttcttcctgtacagcaagctgaccgtggacaagagcagatggcagcagggcaacgtgttcagctgcagcgtgatgcacgaggccctgcacaatcactacacccagaagagcctgagcctgtcccctggcaagtga

SEQ ID NO: 484 - DNA, 1026 bp, Artificial Sequence
  Synthetic
gacatccagatgacccagagccccagcagcctgagcgcctctgtgggcgatagagtgaccatcacctgcagagccagccaggccatcgacagctacctgcactggtatcagcagaagcctggcaaggcccctaagctgctgatctacagcgccagcaatctggagaccggcgtgcctagcagattcagcggcagcggctccggcaccgacttcaccctgcacatcagcagcctgctgcctgaggatttcgccacctactactgccagcaggtggtgtggagacctttcaccttcggccagggcaccaaggtggagatcaagcgggtggagcccaagagcagcgataagacccacacctgccccccctgccctgcccccgagctgctgggcggacccagcgtgttcctgttcccccccaagcctaaggacaccctgatgatcagcagaacccccgaggtgacctgcgtggtggtggatgtgagccacgaggaccctgaggtgaagttcaactggtacgtggacggcgtggaggtgcacaatgccaagaccaagcccagggaggagcagtacaacagcacctaccgggtggtgtccgtgctgaccgtgctgcaccaggattggctgaacggcaaggagtacaagtgcaaggtgtccaacaaggccctgcctgcccctatcgagaaaaccatcagcaaggccaagggccagcccagagagccccaggtgtacaccctgccccctagcagagatgagctgaccaagaaccaggtgtccctgacctgcctggtgaagggcttctaccccagcgacatcgccgtggagtgggagagcaacggccagcccgagaacaactacaagaccaccccccctgtgctggacagcgatggcagcttcttcctgtacagcaagctgaccgtggacaagagcagatggcagcagggcaacgtgttcagctgcagcgtgatgcacgaggccctgcacaatcactacacccagaagagcctgagcctgtcccctggcaagtga

SEQ ID NO: 485 - DNA, 1026 bp, Artificial Sequence
  Synthetic
gacatccagatgacccagagccccagcagcctgagcgcctctgtgggcgatagagtgaccatcacctgcagagccagccaggccatcgacagctacctgcactggtatcagcagaagcctggcaaggcccctaagctgctgatctacagcgccagcaatctggagaccggcgtgcctagcagattcagcggcagcggctccggcaccgacttcaccctgcccatcagcagcctgctgcctgaggatttcgccacctactactgccagcaggtggtgtggagacctttcaccttcggccagggcaccaaggtggagatcaagcgggtggagcccaagagcagcgataagacccacacctgccccccctgccctgcccccgagctgctgggcggacccagcgtgttcctgttcccccccaagcctaaggacaccctgatgatcagcagaacccccgaggtgacctgcgtggtggtggatgtgagccacgaggaccctgaggtgaagttcaactggtacgtggacggcgtggaggtgcacaatgccaagaccaagcccagggaggagcagtacaacagcacctaccgggtggtgtccgtgctgaccgtgctgcaccaggattggctgaacggcaaggagtacaagtgcaaggtgtccaacaaggccctgcctgcccctatcgagaaaaccatcagcaaggccaagggccagcccagagagccccaggtgtacaccctgccccctagcagagatgagctgaccaagaaccaggtgtccctgacctgcctggtgaagggcttctaccccagcgacatcgccgtggagtgggagagcaacggccagcccgagaacaactacaagaccaccccccctgtgctggacagcgatggcagcttcttcctgtacagcaagctgaccgtggacaagagcagatggcagcagggcaacgtgttcagctgcagcgtgatgcacgaggccctgcacaatcactacacccagaagagcctgagcctgtcccctggcaagtga

SEQ ID NO: 486 - DNA, 1026 bp, Artificial Sequence
  Synthetic
gacatccagatgacccagagccccagcagcctgagcgcctctgtgggcgatagagtgaccatcacctgcagagccagccaggccatcgacagctacctgcactggtatcagcagaagcctggcaaggcccctaagctgctgatctacagcgccagcaatctggagaccggcgtgcctagcagattcagcggcagcggctccggcaccgacttcaccctgaccagcagcagcctgctgcctgaggatttcgccacctactactgccagcaggtggtgtggagacctttcaccttcggccagggcaccaaggtggagatcaagcgggtggagcccaagagcagcgataagacccacacctgccccccctgccctgcccccgagctgctgggcggacccagcgtgttcctgttcccccccaagcctaaggacaccctgatgatcagcagaacccccgaggtgacctgcgtggtggtggatgtgagccacgaggaccctgaggtgaagttcaactggtacgtggacggcgtggaggtgcacaatgccaagaccaagcccagggaggagcagtacaacagcacctaccgggtggtgtccgtgctgaccgtgctgcaccaggattggctgaacggcaaggagtacaagtgcaaggtgtccaacaaggccctgcctgcccctatcgagaaaaccatcagcaaggccaagggccagcccagagagccccaggtgtacaccctgccccctagcagagatgagctgaccaagaaccaggtgtccctgacctgcctggtgaagggcttctaccccagcgacatcgccgtggagtgggagagcaacggccagcccgagaacaactacaagaccaccccccctgtgctggacagcgatggcagcttcttcctgtacagcaagctgaccgtggacaagagcagatggcagcagggcaacgtgttcagctgcagcgtgatgcacgaggccctgcacaatcactacacccagaagagcctgagcctgtcccctggcaagtga

SEQ ID NO: 487 - DNA, 1026 bp, Artificial Sequence
  Synthetic
gacatccagatgacccagagccccagcagcctgagcgcctctgtgggcgatagagtgaccatcacctgcagagccagccaggccatcgacagctacctgcactggtatcagcagaagcctggcaaggcccctaagctgctgatctacagcgccagcaatctggagaccggcgtgcctagcagattcagcggcagcggctccggcaccgacttcaccctgaccctgagcagcctgctgcctgaggatttcgccacctactactgccagcaggtggtgtggagacctttcaccttcggccagggcaccaaggtggagatcaagcgggtggagcccaagagcagcgataagacccacacctgccccccctgccctgcccccgagctgctgggcggacccagcgtgttcctgttcccccccaagcctaaggacaccctgatgatcagcagaacccccgaggtgacctgcgtggtggtggatgtgagccacgaggaccctgaggtgaagttcaactggtacgtggacggcgtggaggtgcacaatgccaagaccaagcccagggaggagcagtacaacagcacctaccgggtggtgtccgtgctgaccgtgctgcaccaggattggctgaacggcaaggagtacaagtgcaaggtgtccaacaaggccctgcctgcccctatcgagaaaaccatcagcaaggccaagggccagcccagagagccccaggtgtacaccctgccccctagcagagatgagctgaccaagaaccaggtgtccctgacctgcctggtgaagggcttctaccccagcgacatcgccgtggagtgggagagcaacggccagcccgagaacaactacaagaccaccccccctgtgctggacagcgatggcagcttcttcctgtacagcaagctgaccgtggacaagagcagatggcagcagggcaacgtgttcagctgcagcgtgatgcacgaggccctgcacaatcactacacccagaagagcctgagcctgtcccctggcaagtga

SEQ ID NO: 488 - DNA, 1026 bp, Artificial Sequence
  Synthetic
gacatccagatgacccagagccccagcagcctgagcgcctctgtgggcgatagagtgaccatcacctgcagagccagccaggccatcgacagctacctgcactggtatcagcagaagcctggcaaggcccctaagctgctgatctacagcgccagcaatctggagaccggcgtgcctagcagattcagcggcagcggctccggcaccgacttcaccctgacctacagcagcctgctgcctgaggatttcgccacctactactgccagcaggtggtgtggagacctttcaccttcggccagggcaccaaggtggagatcaagcgggtggagcccaagagcagcgataagacccacacctgccccccctgccctgcccccgagctgctgggcggacccagcgtgttcctgttcccccccaagcctaaggacaccctgatgatcagcagaacccccgaggtgacctgcgtggtggtggatgtgagccacgaggaccctgaggtgaagttcaactggtacgtggacggcgtggaggtgcacaatgccaagaccaagcccagggaggagcagtacaacagcacctaccgggtggtgtccgtgctgaccgtgctgcaccaggattggctgaacggcaaggagtacaagtgcaaggtgtccaacaaggccctgcctgcccctatcgagaaaaccatcagcaaggccaagggccagcccagagagccccaggtgtacaccctgccccctagcagagatgagctgaccaagaaccaggtgtccctgacctgcctggtgaagggcttctaccccagcgacatcgccgtggagtgggagagcaacggccagcccgagaacaactacaagaccaccccccctgtgctggacagcgatggcagcttcttcctgtacagcaagctgaccgtggacaagagcagatggcagcagggcaacgtgttcagctgcagcgtgatgcacgaggccctgcacaatcactacacccagaagagcctgagcctgtcccctggcaagtga

SEQ ID NO: 489 - DNA, 1026 bp, Artificial Sequence
  Synthetic
gacatccagatgacccagagccccagcagcctgagcgcctctgtgggcgatagagtgaccatcacctgcagagccagccaggccatcgacagctacctgcactggtatcagcagaagcctggcaaggcccctaagctgctgatctacagcgccagcaatctggagaccggcgtgcctagcagattcagcggcagcggctccggcaccgacttcaccctgaccgacagcagcctgctgcctgaggatttcgccacctactactgccagcaggtggtgtggagacctttcaccttcggccagggcaccaaggtggagatcaagcgggtggagcccaagagcagcgataagacccacacctgccccccctgccctgcccccgagctgctgggcggacccagcgtgttcctgttcccccccaagcctaaggacaccctgatgatcagcagaacccccgaggtgacctgcgtggtggtggatgtgagccacgaggaccctgaggtgaagttcaactggtacgtggacggcgtggaggtgcacaatgccaagaccaagcccagggaggagcagtacaacagcacctaccgggtggtgtccgtgctgaccgtgctgcaccaggattggctgaacggcaaggagtacaagtgcaaggtgtccaacaaggccctgcctgcccctatcgagaaaaccatcagcaaggccaagggccagcccagagagccccaggtgtacaccctgccccctagcagagatgagctgaccaagaaccaggtgtccctgacctgcctggtgaagggcttctaccccagcgacatcgccgtggagtgggagagcaacggccagcccgagaacaactacaagaccaccccccctgtgctggacagcgatggcagcttcttcctgtacagcaagctgaccgtggacaagagcagatggcagcagggcaacgtgttcagctgcagcgtgatgcacgaggccctgcacaatcactacacccagaagagcctgagcctgtcccctggcaagtga

SEQ ID NO: 490 - DNA, 1026 bp, Artificial Sequence
  Synthetic
gacatccagatgacccagagccccagcagcctgagcgcctctgtgggcgatagagtgaccatcacctgcagagccagccaggccatcgacagctacctgcactggtatcagcagaagcctggcaaggcccctaagctgctgatctacagcgccagcaatctggagaccggcgtgcctagcagattcagcggcagcggctccggcaccgacttcaccctgacccagagcagcctgctgcctgaggatttcgccacctactactgccagcaggtggtgtggagacctttcaccttcggccagggcaccaaggtggagatcaagcgggtggagcccaagagcagcgataagacccacacctgccccccctgccctgcccccgagctgctgggcggacccagcgtgttcctgttcccccccaagcctaaggacaccctgatgatcagcagaacccccgaggtgacctgcgtggtggtggatgtgagccacgaggaccctgaggtgaagttcaactggtacgtggacggcgtggaggtgcacaatgccaagaccaagcccagggaggagcagtacaacagcacctaccgggtggtgtccgtgctgaccgtgctgcaccaggattggctgaacggcaaggagtacaagtgcaaggtgtccaacaaggccctgcctgcccctatcgagaaaaccatcagcaaggccaagggccagcccagagagccccaggtgtacaccctgccccctagcagagatgagctgaccaagaaccaggtgtccctgacctgcctggtgaagggcttctaccccagcgacatcgccgtggagtgggagagcaacggccagcccgagaacaactacaagaccaccccccctgtgctggacagcgatggcagcttcttcctgtacagcaagctgaccgtggacaagagcagatggcagcagggcaacgtgttcagctgcagcgtgatgcacgaggccctgcacaatcactacacccagaagagcctgagcctgtcccctggcaagtga

SEQ ID NO: 491 - DNA, 1026 bp, Artificial Sequence
  Synthetic
gacatccagatgacccagagccccagcagcctgagcgcctctgtgggcgatagagtgaccatcacctgcagagccagccaggccatcgacagctacctgcactggtatcagcagaagcctggcaaggcccctaagctgctgatctacagcgccagcaatctggagaccggcgtgcctagcagattcagcggcagcggctccggcaccgacttcaccctgacccacagcagcctgctgcctgaggatttcgccacctactactgccagcaggtggtgtggagacctttcaccttcggccagggcaccaaggtggagatcaagcgggtggagcccaagagcagcgataagacccacacctgccccccctgccctgcccccgagctgctgggcggacccagcgtgttcctgttcccccccaagcctaaggacaccctgatgatcagcagaacccccgaggtgacctgcgtggtggtggatgtgagccacgaggaccctgaggtgaagttcaactggtacgtggacggcgtggaggtgcacaatgccaagaccaagcccagggaggagcagtacaacagcacctaccgggtggtgtccgtgctgaccgtgctgcaccaggattggctgaacggcaaggagtacaagtgcaaggtgtccaacaaggccctgcctgcccctatcgagaaaaccatcagcaaggccaagggccagcccagagagccccaggtgtacaccctgccccctagcagagatgagctgaccaagaaccaggtgtccctgacctgcctggtgaagggcttctaccccagcgacatcgccgtggagtgggagagcaacggccagcccgagaacaactacaagaccaccccccctgtgctggacagcgatggcagcttcttcctgtacagcaagctgaccgtggacaagagcagatggcagcagggcaacgtgttcagctgcagcgtgatgcacgaggccctgcacaatcactacacccagaagagcctgagcctgtcccctggcaagtga

SEQ ID NO: 492 - DNA, 1026 bp, Artificial Sequence
  Synthetic
gacatccagatgacccagagccccagcagcctgagcgcctctgtgggcgatagagtgaccatcacctgcagagccagccaggccatcgacagctacctgcactggtatcagcagaagcctggcaaggcccctaagctgctgatctacagcgccagcaatctggagaccggcgtgcctagcagattcagcggcagcggctccggcaccgacttcaccctgacccccagcagcctgctgcctgaggatttcgccacctactactgccagcaggtggtgtggagacctttcaccttcggccagggcaccaaggtggagatcaagcgggtggagcccaagagcagcgataagacccacacctgccccccctgccctgcccccgagctgctgggcggacccagcgtgttcctgttcccccccaagcctaaggacaccctgatgatcagcagaacccccgaggtgacctgcgtggtggtggatgtgagccacgaggaccctgaggtgaagttcaactggtacgtggacggcgtggaggtgcacaatgccaagaccaagcccagggaggagcagtacaacagcacctaccgggtggtgtccgtgctgaccgtgctgcaccaggattggctgaacggcaaggagtacaagtgcaaggtgtccaacaaggccctgcctgcccctatcgagaaaaccatcagcaaggccaagggccagcccagagagccccaggtgtacaccctgccccctagcagagatgagctgaccaagaaccaggtgtccctgacctgcctggtgaagggcttctaccccagcgacatcgccgtggagtgggagagcaacggccagcccgagaacaactacaagaccaccccccctgtgctggacagcgatggcagcttcttcctgtacagcaagctgaccgtggacaagagcagatggcagcagggcaacgtgttcagctgcagcgtgatgcacgaggccctgcacaatcactacacccagaagagcctgagcctgtcccctggcaagtga

SEQ ID NO: 493 - DNA, 1026 bp, Artificial Sequence
  Synthetic
gacatccagatgacccagagccccagcagcctgagcgcctctgtgggcgatagagtgaccatcacctgcagagccagccaggccatcgacagctacctgcactggtatcagcagaagcctggcaaggcccctaagctgctgatctacagcgccagcaatctggagaccggcgtgcctagcagattcagcggcagcggctccggcaccgacttcaccctgaccaagagcagcctgctgcctgaggatttcgccacctactactgccagcaggtggtgtggagacctttcaccttcggccagggcaccaaggtggagatcaagcgggtggagcccaagagcagcgataagacccacacctgccccccctgccctgcccccgagctgctgggcggacccagcgtgttcctgttcccccccaagcctaaggacaccctgatgatcagcagaacccccgaggtgacctgcgtggtggtggatgtgagccacgaggaccctgaggtgaagttcaactggtacgtggacggcgtggaggtgcacaatgccaagaccaagcccagggaggagcagtacaacagcacctaccgggtggtgtccgtgctgaccgtgctgcaccaggattggctgaacggcaaggagtacaagtgcaaggtgtccaacaaggccctgcctgcccctatcgagaaaaccatcagcaaggccaagggccagcccagagagccccaggtgtacaccctgccccctagcagagatgagctgaccaagaaccaggtgtccctgacctgcctggtgaagggcttctaccccagcgacatcgccgtggagtgggagagcaacggccagcccgagaacaactacaagaccaccccccctgtgctggacagcgatggcagcttcttcctgtacagcaagctgaccgtggacaagagcagatggcagcagggcaacgtgttcagctgcagcgtgatgcacgaggccctgcacaatcactacacccagaagagcctgagcctgtcccctggcaagtga

SEQ ID NO: 494 - DNA, 1026 bp, Artificial Sequence
  Synthetic
gacatccagatgacccagagccccagcagcctgagcgcctctgtgggcgatagagtgaccatcacctgcagagccagccaggccatcgacagctacctgcactggtatcagcagaagcctggcaaggcccctaagctgctgatctacagcgccagcaatctggagaccggcgtgcctagcagattcagcggcagcggctccggcaccgacttcaccctgaccatcctgagcctgctgcctgaggatttcgccacctactactgccagcaggtggtgtggagacctttcaccttcggccagggcaccaaggtggagatcaagcgggtggagcccaagagcagcgataagacccacacctgccccccctgccctgcccccgagctgctgggcggacccagcgtgttcctgttcccccccaagcctaaggacaccctgatgatcagcagaacccccgaggtgacctgcgtggtggtggatgtgagccacgaggaccctgaggtgaagttcaactggtacgtggacggcgtggaggtgcacaatgccaagaccaagcccagggaggagcagtacaacagcacctaccgggtggtgtccgtgctgaccgtgctgcaccaggattggctgaacggcaaggagtacaagtgcaaggtgtccaacaaggccctgcctgcccctatcgagaaaaccatcagcaaggccaagggccagcccagagagccccaggtgtacaccctgccccctagcagagatgagctgaccaagaaccaggtgtccctgacctgcctggtgaagggcttctaccccagcgacatcgccgtggagtgggagagcaacggccagcccgagaacaactacaagaccaccccccctgtgctggacagcgatggcagcttcttcctgtacagcaagctgaccgtggacaagagcagatggcagcagggcaacgtgttcagctgcagcgtgatgcacgaggccctgcacaatcactacacccagaagagcctgagcctgtcccctggcaagtga

SEQ ID NO: 495 - DNA, 1026 bp, Artificial Sequence
  Synthetic
gacatccagatgacccagagccccagcagcctgagcgcctctgtgggcgatagagtgaccatcacctgcagagccagccaggccatcgacagctacctgcactggtatcagcagaagcctggcaaggcccctaagctgctgatctacagcgccagcaatctggagaccggcgtgcctagcagattcagcggcagcggctccggcaccgacttcaccctgaccatctacagcctgctgcctgaggatttcgccacctactactgccagcaggtggtgtggagacctttcaccttcggccagggcaccaaggtggagatcaagcgggtggagcccaagagcagcgataagacccacacctgccccccctgccctgcccccgagctgctgggcggacccagcgtgttcctgttcccccccaagcctaaggacaccctgatgatcagcagaacccccgaggtgacctgcgtggtggtggatgtgagccacgaggaccctgaggtgaagttcaactggtacgtggacggcgtggaggtgcacaatgccaagaccaagcccagggaggagcagtacaacagcacctaccgggtggtgtccgtgctgaccgtgctgcaccaggattggctgaacggcaaggagtacaagtgcaaggtgtccaacaaggccctgcctgcccctatcgagaaaaccatcagcaaggccaagggccagcccagagagccccaggtgtacaccctgccccctagcagagatgagctgaccaagaaccaggtgtccctgacctgcctggtgaagggcttctaccccagcgacatcgccgtggagtgggagagcaacggccagcccgagaacaactacaagaccaccccccctgtgctggacagcgatggcagcttcttcctgtacagcaagctgaccgtggacaagagcagatggcagcagggcaacgtgttcagctgcagcgtgatgcacgaggccctgcacaatcactacacccagaagagcctgagcctgtcccctggcaagtga

SEQ ID NO: 496 - DNA, 1026 bp, Artificial Sequence
  Synthetic
gacatccagatgacccagagccccagcagcctgagcgcctctgtgggcgatagagtgaccatcacctgcagagccagccaggccatcgacagctacctgcactggtatcagcagaagcctggcaaggcccctaagctgctgatctacagcgccagcaatctggagaccggcgtgcctagcagattcagcggcagcggctccggcaccgacttcaccctgaccatcgacagcctgctgcctgaggatttcgccacctactactgccagcaggtggtgtggagacctttcaccttcggccagggcaccaaggtggagatcaagcgggtggagcccaagagcagcgataagacccacacctgccccccctgccctgcccccgagctgctgggcggacccagcgtgttcctgttcccccccaagcctaaggacaccctgatgatcagcagaacccccgaggtgacctgcgtggtggtggatgtgagccacgaggaccctgaggtgaagttcaactggtacgtggacggcgtggaggtgcacaatgccaagaccaagcccagggaggagcagtacaacagcacctaccgggtggtgtccgtgctgaccgtgctgcaccaggattggctgaacggcaaggagtacaagtgcaaggtgtccaacaaggccctgcctgcccctatcgagaaaaccatcagcaaggccaagggccagcccagagagccccaggtgtacaccctgccccctagcagagatgagctgaccaagaaccaggtgtccctgacctgcctggtgaagggcttctaccccagcgacatcgccgtggagtgggagagcaacggccagcccgagaacaactacaagaccaccccccctgtgctggacagcgatggcagcttcttcctgtacagcaagctgaccgtggacaagagcagatggcagcagggcaacgtgttcagctgcagcgtgatgcacgaggccctgcacaatcactacacccagaagagcctgagcctgtcccctggcaagtga

SEQ ID NO: 497 - DNA, 1026 bp, Artificial Sequence
  Synthetic
gacatccagatgacccagagccccagcagcctgagcgcctctgtgggcgatagagtgaccatcacctgcagagccagccaggccatcgacagctacctgcactggtatcagcagaagcctggcaaggcccctaagctgctgatctacagcgccagcaatctggagaccggcgtgcctagcagattcagcggcagcggctccggcaccgacttcaccctgaccatccagagcctgctgcctgaggatttcgccacctactactgccagcaggtggtgtggagacctttcaccttcggccagggcaccaaggtggagatcaagcgggtggagcccaagagcagcgataagacccacacctgccccccctgccctgcccccgagctgctgggcggacccagcgtgttcctgttcccccccaagcctaaggacaccctgatgatcagcagaacccccgaggtgacctgcgtggtggtggatgtgagccacgaggaccctgaggtgaagttcaactggtacgtggacggcgtggaggtgcacaatgccaagaccaagcccagggaggagcagtacaacagcacctaccgggtggtgtccgtgctgaccgtgctgcaccaggattggctgaacggcaaggagtacaagtgcaaggtgtccaacaaggccctgcctgcccctatcgagaaaaccatcagcaaggccaagggccagcccagagagccccaggtgtacaccctgccccctagcagagatgagctgaccaagaaccaggtgtccctgacctgcctggtgaagggcttctaccccagcgacatcgccgtggagtgggagagcaacggccagcccgagaacaactacaagaccaccccccctgtgctggacagcgatggcagcttcttcctgtacagcaagctgaccgtggacaagagcagatggcagcagggcaacgtgttcagctgcagcgtgatgcacgaggccctgcacaatcactacacccagaagagcctgagcctgtcccctggcaagtga

SEQ ID NO: 498 - DNA, 1026 bp, Artificial Sequence
  Synthetic
gacatccagatgacccagagccccagcagcctgagcgcctctgtgggcgatagagtgaccatcacctgcagagccagccaggccatcgacagctacctgcactggtatcagcagaagcctggcaaggcccctaagctgctgatctacagcgccagcaatctggagaccggcgtgcctagcagattcagcggcagcggctccggcaccgacttcaccctgaccatccacagcctgctgcctgaggatttcgccacctactactgccagcaggtggtgtggagacctttcaccttcggccagggcaccaaggtggagatcaagcgggtggagcccaagagcagcgataagacccacacctgccccccctgccctgcccccgagctgctgggcggacccagcgtgttcctgttcccccccaagcctaaggacaccctgatgatcagcagaacccccgaggtgacctgcgtggtggtggatgtgagccacgaggaccctgaggtgaagttcaactggtacgtggacggcgtggaggtgcacaatgccaagaccaagcccagggaggagcagtacaacagcacctaccgggtggtgtccgtgctgaccgtgctgcaccaggattggctgaacggcaaggagtacaagtgcaaggtgtccaacaaggccctgcctgcccctatcgagaaaaccatcagcaaggccaagggccagcccagagagccccaggtgtacaccctgccccctagcagagatgagctgaccaagaaccaggtgtccctgacctgcctggtgaagggcttctaccccagcgacatcgccgtggagtgggagagcaacggccagcccgagaacaactacaagaccaccccccctgtgctggacagcgatggcagcttcttcctgtacagcaagctgaccgtggacaagagcagatggcagcagggcaacgtgttcagctgcagcgtgatgcacgaggccctgcacaatcactacacccagaagagcctgagcctgtcccctggcaagtga

SEQ ID NO: 499 - DNA, 1026 bp, Artificial Sequence
  Synthetic
gacatccagatgacccagagccccagcagcctgagcgcctctgtgggcgatagagtgaccatcacctgcagagccagccaggccatcgacagctacctgcactggtatcagcagaagcctggcaaggcccctaagctgctgatctacagcgccagcaatctggagaccggcgtgcctagcagattcagcggcagcggctccggcaccgacttcaccctgaccatccccagcctgctgcctgaggatttcgccacctactactgccagcaggtggtgtggagacctttcaccttcggccagggcaccaaggtggagatcaagcgggtggagcccaagagcagcgataagacccacacctgccccccctgccctgcccccgagctgctgggcggacccagcgtgttcctgttcccccccaagcctaaggacaccctgatgatcagcagaacccccgaggtgacctgcgtggtggtggatgtgagccacgaggaccctgaggtgaagttcaactggtacgtggacggcgtggaggtgcacaatgccaagaccaagcccagggaggagcagtacaacagcacctaccgggtggtgtccgtgctgaccgtgctgcaccaggattggctgaacggcaaggagtacaagtgcaaggtgtccaacaaggccctgcctgcccctatcgagaaaaccatcagcaaggccaagggccagcccagagagccccaggtgtacaccctgccccctagcagagatgagctgaccaagaaccaggtgtccctgacctgcctggtgaagggcttctaccccagcgacatcgccgtggagtgggagagcaacggccagcccgagaacaactacaagaccaccccccctgtgctggacagcgatggcagcttcttcctgtacagcaagctgaccgtggacaagagcagatggcagcagggcaacgtgttcagctgcagcgtgatgcacgaggccctgcacaatcactacacccagaagagcctgagcctgtcccctggcaagtga

SEQ ID NO: 500 - DNA, 1026 bp, Artificial Sequence
  Synthetic
gacatccagatgacccagagccccagcagcctgagcgcctctgtgggcgatagagtgaccatcacctgcagagccagccaggccatcgacagctacctgcactggtatcagcagaagcctggcaaggcccctaagctgctgatctacagcgccagcaatctggagaccggcgtgcctagcagattcagcggcagcggctccggcaccgacttcaccctgaccatcaagagcctgctgcctgaggatttcgccacctactactgccagcaggtggtgtggagacctttcaccttcggccagggcaccaaggtggagatcaagcgggtggagcccaagagcagcgataagacccacacctgccccccctgccctgcccccgagctgctgggcggacccagcgtgttcctgttcccccccaagcctaaggacaccctgatgatcagcagaacccccgaggtgacctgcgtggtggtggatgtgagccacgaggaccctgaggtgaagttcaactggtacgtggacggcgtggaggtgcacaatgccaagaccaagcccagggaggagcagtacaacagcacctaccgggtggtgtccgtgctgaccgtgctgcaccaggattggctgaacggcaaggagtacaagtgcaaggtgtccaacaaggccctgcctgcccctatcgagaaaaccatcagcaaggccaagggccagcccagagagccccaggtgtacaccctgccccctagcagagatgagctgaccaagaaccaggtgtccctgacctgcctggtgaagggcttctaccccagcgacatcgccgtggagtgggagagcaacggccagcccgagaacaactacaagaccaccccccctgtgctggacagcgatggcagcttcttcctgtacagcaagctgaccgtggacaagagcagatggcagcagggcaacgtgttcagctgcagcgtgatgcacgaggccctgcacaatcactacacccagaagagcctgagcctgtcccctggcaagtga

SEQ ID NO: 501 - DNA, 1026 bp, Artificial Sequence
  Synthetic
gacatccagatgacccagagccccagcagcctgagcgcctctgtgggcgatagagtgaccatcacctgcagagccagccaggccatcgacagctacctgcactggtatcagcagaagcctggcaaggcccctaagctgctgatctacagcgccagcaatctggagaccggcgtgcctagcagattcagcggcagcggctccggcaccgacttcaccctgaccatcagcctgctgctgcctgaggatttcgccacctactactgccagcaggtggtgtggagacctttcaccttcggccagggcaccaaggtggagatcaagcgggtggagcccaagagcagcgataagacccacacctgccccccctgccctgcccccgagctgctgggcggacccagcgtgttcctgttcccccccaagcctaaggacaccctgatgatcagcagaacccccgaggtgacctgcgtggtggtggatgtgagccacgaggaccctgaggtgaagttcaactggtacgtggacggcgtggaggtgcacaatgccaagaccaagcccagggaggagcagtacaacagcacctaccgggtggtgtccgtgctgaccgtgctgcaccaggattggctgaacggcaaggagtacaagtgcaaggtgtccaacaaggccctgcctgcccctatcgagaaaaccatcagcaaggccaagggccagcccagagagccccaggtgtacaccctgccccctagcagagatgagctgaccaagaaccaggtgtccctgacctgcctggtgaagggcttctaccccagcgacatcgccgtggagtgggagagcaacggccagcccgagaacaactacaagaccaccccccctgtgctggacagcgatggcagcttcttcctgtacagcaagctgaccgtggacaagagcagatggcagcagggcaacgtgttcagctgcagcgtgatgcacgaggccctgcacaatcactacacccagaagagcctgagcctgtcccctggcaagtga

SEQ ID NO: 502 - DNA, 1026 bp, Artificial Sequence
  Synthetic
gacatccagatgacccagagccccagcagcctgagcgcctctgtgggcgatagagtgaccatcacctgcagagccagccaggccatcgacagctacctgcactggtatcagcagaagcctggcaaggcccctaagctgctgatctacagcgccagcaatctggagaccggcgtgcctagcagattcagcggcagcggctccggcaccgacttcaccctgaccatcagctacctgctgcctgaggatttcgccacctactactgccagcaggtggtgtggagacctttcaccttcggccagggcaccaaggtggagatcaagcgggtggagcccaagagcagcgataagacccacacctgccccccctgccctgcccccgagctgctgggcggacccagcgtgttcctgttcccccccaagcctaaggacaccctgatgatcagcagaacccccgaggtgacctgcgtggtggtggatgtgagccacgaggaccctgaggtgaagttcaactggtacgtggacggcgtggaggtgcacaatgccaagaccaagcccagggaggagcagtacaacagcacctaccgggtggtgtccgtgctgaccgtgctgcaccaggattggctgaacggcaaggagtacaagtgcaaggtgtccaacaaggccctgcctgcccctatcgagaaaaccatcagcaaggccaagggccagcccagagagccccaggtgtacaccctgccccctagcagagatgagctgaccaagaaccaggtgtccctgacctgcctggtgaagggcttctaccccagcgacatcgccgtggagtgggagagcaacggccagcccgagaacaactacaagaccaccccccctgtgctggacagcgatggcagcttcttcctgtacagcaagctgaccgtggacaagagcagatggcagcagggcaacgtgttcagctgcagcgtgatgcacgaggccctgcacaatcactacacccagaagagcctgagcctgtcccctggcaagtga

SEQ ID NO: 503 - DNA, 1026 bp, Artificial Sequence
  Synthetic
gacatccagatgacccagagccccagcagcctgagcgcctctgtgggcgatagagtgaccatcacctgcagagccagccaggccatcgacagctacctgcactggtatcagcagaagcctggcaaggcccctaagctgctgatctacagcgccagcaatctggagaccggcgtgcctagcagattcagcggcagcggctccggcaccgacttcaccctgaccatcagcgacctgctgcctgaggatttcgccacctactactgccagcaggtggtgtggagacctttcaccttcggccagggcaccaaggtggagatcaagcgggtggagcccaagagcagcgataagacccacacctgccccccctgccctgcccccgagctgctgggcggacccagcgtgttcctgttcccccccaagcctaaggacaccctgatgatcagcagaacccccgaggtgacctgcgtggtggtggatgtgagccacgaggaccctgaggtgaagttcaactggtacgtggacggcgtggaggtgcacaatgccaagaccaagcccagggaggagcagtacaacagcacctaccgggtggtgtccgtgctgaccgtgctgcaccaggattggctgaacggcaaggagtacaagtgcaaggtgtccaacaaggccctgcctgcccctatcgagaaaaccatcagcaaggccaagggccagcccagagagccccaggtgtacaccctgccccctagcagagatgagctgaccaagaaccaggtgtccctgacctgcctggtgaagggcttctaccccagcgacatcgccgtggagtgggagagcaacggccagcccgagaacaactacaagaccaccccccctgtgctggacagcgatggcagcttcttcctgtacagcaagctgaccgtggacaagagcagatggcagcagggcaacgtgttcagctgcagcgtgatgcacgaggccctgcacaatcactacacccagaagagcctgagcctgtcccctggcaagtga

SEQ ID NO: 504 - DNA, 1026 bp, Artificial Sequence
  Synthetic
gacatccagatgacccagagccccagcagcctgagcgcctctgtgggcgatagagtgaccatcacctgcagagccagccaggccatcgacagctacctgcactggtatcagcagaagcctggcaaggcccctaagctgctgatctacagcgccagcaatctggagaccggcgtgcctagcagattcagcggcagcggctccggcaccgacttcaccctgaccatcagccagctgctgcctgaggatttcgccacctactactgccagcaggtggtgtggagacctttcaccttcggccagggcaccaaggtggagatcaagcgggtggagcccaagagcagcgataagacccacacctgccccccctgccctgcccccgagctgctgggcggacccagcgtgttcctgttcccccccaagcctaaggacaccctgatgatcagcagaacccccgaggtgacctgcgtggtggtggatgtgagccacgaggaccctgaggtgaagttcaactggtacgtggacggcgtggaggtgcacaatgccaagaccaagcccagggaggagcagtacaacagcacctaccgggtggtgtccgtgctgaccgtgctgcaccaggattggctgaacggcaaggagtacaagtgcaaggtgtccaacaaggccctgcctgcccctatcgagaaaaccatcagcaaggccaagggccagcccagagagccccaggtgtacaccctgccccctagcagagatgagctgaccaagaaccaggtgtccctgacctgcctggtgaagggcttctaccccagcgacatcgccgtggagtgggagagcaacggccagcccgagaacaactacaagaccaccccccctgtgctggacagcgatggcagcttcttcctgtacagcaagctgaccgtggacaagagcagatggcagcagggcaacgtgttcagctgcagcgtgatgcacgaggccctgcacaatcactacacccagaagagcctgagcctgtcccctggcaagtga

SEQ ID NO: 505 - DNA, 1026 bp, Artificial Sequence
  Synthetic
gacatccagatgacccagagccccagcagcctgagcgcctctgtgggcgatagagtgaccatcacctgcagagccagccaggccatcgacagctacctgcactggtatcagcagaagcctggcaaggcccctaagctgctgatctacagcgccagcaatctggagaccggcgtgcctagcagattcagcggcagcggctccggcaccgacttcaccctgaccatcagccacctgctgcctgaggatttcgccacctactactgccagcaggtggtgtggagacctttcaccttcggccagggcaccaaggtggagatcaagcgggtggagcccaagagcagcgataagacccacacctgccccccctgccctgcccccgagctgctgggcggacccagcgtgttcctgttcccccccaagcctaaggacaccctgatgatcagcagaacccccgaggtgacctgcgtggtggtggatgtgagccacgaggaccctgaggtgaagttcaactggtacgtggacggcgtggaggtgcacaatgccaagaccaagcccagggaggagcagtacaacagcacctaccgggtggtgtccgtgctgaccgtgctgcaccaggattggctgaacggcaaggagtacaagtgcaaggtgtccaacaaggccctgcctgcccctatcgagaaaaccatcagcaaggccaagggccagcccagagagccccaggtgtacaccctgccccctagcagagatgagctgaccaagaaccaggtgtccctgacctgcctggtgaagggcttctaccccagcgacatcgccgtggagtgggagagcaacggccagcccgagaacaactacaagaccaccccccctgtgctggacagcgatggcagcttcttcctgtacagcaagctgaccgtggacaagagcagatggcagcagggcaacgtgttcagctgcagcgtgatgcacgaggccctgcacaatcactacacccagaagagcctgagcctgtcccctggcaagtga

SEQ ID NO: 506 - DNA, 1026 bp, Artificial Sequence
  Synthetic
gacatccagatgacccagagccccagcagcctgagcgcctctgtgggcgatagagtgaccatcacctgcagagccagccaggccatcgacagctacctgcactggtatcagcagaagcctggcaaggcccctaagctgctgatctacagcgccagcaatctggagaccggcgtgcctagcagattcagcggcagcggctccggcaccgacttcaccctgaccatcagcaagctgctgcctgaggatttcgccacctactactgccagcaggtggtgtggagacctttcaccttcggccagggcaccaaggtggagatcaagcgggtggagcccaagagcagcgataagacccacacctgccccccctgccctgcccccgagctgctgggcggacccagcgtgttcctgttcccccccaagcctaaggacaccctgatgatcagcagaacccccgaggtgacctgcgtggtggtggatgtgagccacgaggaccctgaggtgaagttcaactggtacgtggacggcgtggaggtgcacaatgccaagaccaagcccagggaggagcagtacaacagcacctaccgggtggtgtccgtgctgaccgtgctgcaccaggattggctgaacggcaaggagtacaagtgcaaggtgtccaacaaggccctgcctgcccctatcgagaaaaccatcagcaaggccaagggccagcccagagagccccaggtgtacaccctgccccctagcagagatgagctgaccaagaaccaggtgtccctgacctgcctggtgaagggcttctaccccagcgacatcgccgtggagtgggagagcaacggccagcccgagaacaactacaagaccaccccccctgtgctggacagcgatggcagcttcttcctgtacagcaagctgaccgtggacaagagcagatggcagcagggcaacgtgttcagctgcagcgtgatgcacgaggccctgcacaatcactacacccagaagagcctgagcctgtcccctggcaagtga

SEQ ID NO: 507 - DNA, 1026 bp, Artificial Sequence
  Synthetic
gacatccagatgacccagagccccagcagcctgagcgcctctgtgggcgatagagtgaccatcacctgcagagccagccaggccatcgacagctacctgcactggtatcagcagaagcctggcaaggcccctaagctgctgatctacagcgccagcaatctggagaccggcgtgcctagcagattcagcggcagcggctccggcaccgacttcaccctgaccatcagcagcagcctgcctgaggatttcgccacctactactgccagcaggtggtgtggagacctttcaccttcggccagggcaccaaggtggagatcaagcgggtggagcccaagagcagcgataagacccacacctgccccccctgccctgcccccgagctgctgggcggacccagcgtgttcctgttcccccccaagcctaaggacaccctgatgatcagcagaacccccgaggtgacctgcgtggtggtggatgtgagccacgaggaccctgaggtgaagttcaactggtacgtggacggcgtggaggtgcacaatgccaagaccaagcccagggaggagcagtacaacagcacctaccgggtggtgtccgtgctgaccgtgctgcaccaggattggctgaacggcaaggagtacaagtgcaaggtgtccaacaaggccctgcctgcccctatcgagaaaaccatcagcaaggccaagggccagcccagagagccccaggtgtacaccctgccccctagcagagatgagctgaccaagaaccaggtgtccctgacctgcctggtgaagggcttctaccccagcgacatcgccgtggagtgggagagcaacggccagcccgagaacaactacaagaccaccccccctgtgctggacagcgatggcagcttcttcctgtacagcaagctgaccgtggacaagagcagatggcagcagggcaacgtgttcagctgcagcgtgatgcacgaggccctgcacaatcactacacccagaagagcctgagcctgtcccctggcaagtga

SEQ ID NO: 508 - DNA, 1026 bp, Artificial Sequence
  Synthetic
gacatccagatgacccagagccccagcagcctgagcgcctctgtgggcgatagagtgaccatcacctgcagagccagccaggccatcgacagctacctgcactggtatcagcagaagcctggcaaggcccctaagctgctgatctacagcgccagcaatctggagaccggcgtgcctagcagattcagcggcagcggctccggcaccgacttcaccctgaccatcagcagctacctgcctgaggatttcgccacctactactgccagcaggtggtgtggagacctttcaccttcggccagggcaccaaggtggagatcaagcgggtggagcccaagagcagcgataagacccacacctgccccccctgccctgcccccgagctgctgggcggacccagcgtgttcctgttcccccccaagcctaaggacaccctgatgatcagcagaacccccgaggtgacctgcgtggtggtggatgtgagccacgaggaccctgaggtgaagttcaactggtacgtggacggcgtggaggtgcacaatgccaagaccaagcccagggaggagcagtacaacagcacctaccgggtggtgtccgtgctgaccgtgctgcaccaggattggctgaacggcaaggagtacaagtgcaaggtgtccaacaaggccctgcctgcccctatcgagaaaaccatcagcaaggccaagggccagcccagagagccccaggtgtacaccctgccccctagcagagatgagctgaccaagaaccaggtgtccctgacctgcctggtgaagggcttctaccccagcgacatcgccgtggagtgggagagcaacggccagcccgagaacaactacaagaccaccccccctgtgctggacagcgatggcagcttcttcctgtacagcaagctgaccgtggacaagagcagatggcagcagggcaacgtgttcagctgcagcgtgatgcacgaggccctgcacaatcactacacccagaagagcctgagcctgtcccctggcaagtga

SEQ ID NO: 509 - DNA, 1026 bp, Artificial Sequence
  Synthetic
gacatccagatgacccagagccccagcagcctgagcgcctctgtgggcgatagagtgaccatcacctgcagagccagccaggccatcgacagctacctgcactggtatcagcagaagcctggcaaggcccctaagctgctgatctacagcgccagcaatctggagaccggcgtgcctagcagattcagcggcagcggctccggcaccgacttcaccctgaccatcagcagcgacctgcctgaggatttcgccacctactactgccagcaggtggtgtggagacctttcaccttcggccagggcaccaaggtggagatcaagcgggtggagcccaagagcagcgataagacccacacctgccccccctgccctgcccccgagctgctgggcggacccagcgtgttcctgttcccccccaagcctaaggacaccctgatgatcagcagaacccccgaggtgacctgcgtggtggtggatgtgagccacgaggaccctgaggtgaagttcaactggtacgtggacggcgtggaggtgcacaatgccaagaccaagcccagggaggagcagtacaacagcacctaccgggtggtgtccgtgctgaccgtgctgcaccaggattggctgaacggcaaggagtacaagtgcaaggtgtccaacaaggccctgcctgcccctatcgagaaaaccatcagcaaggccaagggccagcccagagagccccaggtgtacaccctgccccctagcagagatgagctgaccaagaaccaggtgtccctgacctgcctggtgaagggcttctaccccagcgacatcgccgtggagtgggagagcaacggccagcccgagaacaactacaagaccaccccccctgtgctggacagcgatggcagcttcttcctgtacagcaagctgaccgtggacaagagcagatggcagcagggcaacgtgttcagctgcagcgtgatgcacgaggccctgcacaatcactacacccagaagagcctgagcctgtcccctggcaagtga

SEQ ID NO: 510 - DNA, 1026 bp, Artificial Sequence
  Synthetic
gacatccagatgacccagagccccagcagcctgagcgcctctgtgggcgatagagtgaccatcacctgcagagccagccaggccatcgacagctacctgcactggtatcagcagaagcctggcaaggcccctaagctgctgatctacagcgccagcaatctggagaccggcgtgcctagcagattcagcggcagcggctccggcaccgacttcaccctgaccatcagcagccagctgcctgaggatttcgccacctactactgccagcaggtggtgtggagacctttcaccttcggccagggcaccaaggtggagatcaagcgggtggagcccaagagcagcgataagacccacacctgccccccctgccctgcccccgagctgctgggcggacccagcgtgttcctgttcccccccaagcctaaggacaccctgatgatcagcagaacccccgaggtgacctgcgtggtggtggatgtgagccacgaggaccctgaggtgaagttcaactggtacgtggacggcgtggaggtgcacaatgccaagaccaagcccagggaggagcagtacaacagcacctaccgggtggtgtccgtgctgaccgtgctgcaccaggattggctgaacggcaaggagtacaagtgcaaggtgtccaacaaggccctgcctgcccctatcgagaaaaccatcagcaaggccaagggccagcccagagagccccaggtgtacaccctgccccctagcagagatgagctgaccaagaaccaggtgtccctgacctgcctggtgaagggcttctaccccagcgacatcgccgtggagtgggagagcaacggccagcccgagaacaactacaagaccaccccccctgtgctggacagcgatggcagcttcttcctgtacagcaagctgaccgtggacaagagcagatggcagcagggcaacgtgttcagctgcagcgtgatgcacgaggccctgcacaatcactacacccagaagagcctgagcctgtcccctggcaagtga

SEQ ID NO: 511 - DNA, 1026 bp, Artificial Sequence
  Synthetic
gacatccagatgacccagagccccagcagcctgagcgcctctgtgggcgatagagtgaccatcacctgcagagccagccaggccatcgacagctacctgcactggtatcagcagaagcctggcaaggcccctaagctgctgatctacagcgccagcaatctggagaccggcgtgcctagcagattcagcggcagcggctccggcaccgacttcaccctgaccatcagcagccacctgcctgaggatttcgccacctactactgccagcaggtggtgtggagacctttcaccttcggccagggcaccaaggtggagatcaagcgggtggagcccaagagcagcgataagacccacacctgccccccctgccctgcccccgagctgctgggcggacccagcgtgttcctgttcccccccaagcctaaggacaccctgatgatcagcagaacccccgaggtgacctgcgtggtggtggatgtgagccacgaggaccctgaggtgaagttcaactggtacgtggacggcgtggaggtgcacaatgccaagaccaagcccagggaggagcagtacaacagcacctaccgggtggtgtccgtgctgaccgtgctgcaccaggattggctgaacggcaaggagtacaagtgcaaggtgtccaacaaggccctgcctgcccctatcgagaaaaccatcagcaaggccaagggccagcccagagagccccaggtgtacaccctgccccctagcagagatgagctgaccaagaaccaggtgtccctgacctgcctggtgaagggcttctaccccagcgacatcgccgtggagtgggagagcaacggccagcccgagaacaactacaagaccaccccccctgtgctggacagcgatggcagcttcttcctgtacagcaagctgaccgtggacaagagcagatggcagcagggcaacgtgttcagctgcagcgtgatgcacgaggccctgcacaatcactacacccagaagagcctgagcctgtcccctggcaagtga

SEQ ID NO: 512 - DNA, 1026 bp, Artificial Sequence
  Synthetic
gacatccagatgacccagagccccagcagcctgagcgcctctgtgggcgatagagtgaccatcacctgcagagccagccaggccatcgacagctacctgcactggtatcagcagaagcctggcaaggcccctaagctgctgatctacagcgccagcaatctggagaccggcgtgcctagcagattcagcggcagcggctccggcaccgacttcaccctgaccatcagcagccccctgcctgaggatttcgccacctactactgccagcaggtggtgtggagacctttcaccttcggccagggcaccaaggtggagatcaagcgggtggagcccaagagcagcgataagacccacacctgccccccctgccctgcccccgagctgctgggcggacccagcgtgttcctgttcccccccaagcctaaggacaccctgatgatcagcagaacccccgaggtgacctgcgtggtggtggatgtgagccacgaggaccctgaggtgaagttcaactggtacgtggacggcgtggaggtgcacaatgccaagaccaagcccagggaggagcagtacaacagcacctaccgggtggtgtccgtgctgaccgtgctgcaccaggattggctgaacggcaaggagtacaagtgcaaggtgtccaacaaggccctgcctgcccctatcgagaaaaccatcagcaaggccaagggccagcccagagagccccaggtgtacaccctgccccctagcagagatgagctgaccaagaaccaggtgtccctgacctgcctggtgaagggcttctaccccagcgacatcgccgtggagtgggagagcaacggccagcccgagaacaactacaagaccaccccccctgtgctggacagcgatggcagcttcttcctgtacagcaagctgaccgtggacaagagcagatggcagcagggcaacgtgttcagctgcagcgtgatgcacgaggccctgcacaatcactacacccagaagagcctgagcctgtcccctggcaagtga

SEQ ID NO: 513 - DNA, 1026 bp, Artificial Sequence
  Synthetic
gacatccagatgacccagagccccagcagcctgagcgcctctgtgggcgatagagtgaccatcacctgcagagccagccaggccatcgacagctacctgcactggtatcagcagaagcctggcaaggcccctaagctgctgatctacagcgccagcaatctggagaccggcgtgcctagcagattcagcggcagcggctccggcaccgacttcaccctgaccatcagcagcaagctgcctgaggatttcgccacctactactgccagcaggtggtgtggagacctttcaccttcggccagggcaccaaggtggagatcaagcgggtggagcccaagagcagcgataagacccacacctgccccccctgccctgcccccgagctgctgggcggacccagcgtgttcctgttcccccccaagcctaaggacaccctgatgatcagcagaacccccgaggtgacctgcgtggtggtggatgtgagccacgaggaccctgaggtgaagttcaactggtacgtggacggcgtggaggtgcacaatgccaagaccaagcccagggaggagcagtacaacagcacctaccgggtggtgtccgtgctgaccgtgctgcaccaggattggctgaacggcaaggagtacaagtgcaaggtgtccaacaaggccctgcctgcccctatcgagaaaaccatcagcaaggccaagggccagcccagagagccccaggtgtacaccctgccccctagcagagatgagctgaccaagaaccaggtgtccctgacctgcctggtgaagggcttctaccccagcgacatcgccgtggagtgggagagcaacggccagcccgagaacaactacaagaccaccccccctgtgctggacagcgatggcagcttcttcctgtacagcaagctgaccgtggacaagagcagatggcagcagggcaacgtgttcagctgcagcgtgatgcacgaggccctgcacaatcactacacccagaagagcctgagcctgtcccctggcaagtga

SEQ ID NO: 514 - DNA, 1026 bp, Artificial Sequence
  Synthetic
gacatccagatgacccagagccccagcagcctgagcgcctctgtgggcgatagagtgaccatcacctgcagagccagccaggccatcgacagctacctgcactggtatcagcagaagcctggcaaggcccctaagctgctgatctacagcgccagcaatctggagaccggcgtgcctagcagattcagcggcagcggctccggcaccgacttcaccctgaccatcagcagcctgctgctggaggatttcgccacctactactgccagcaggtggtgtggagacctttcaccttcggccagggcaccaaggtggagatcaagcgggtggagcccaagagcagcgataagacccacacctgccccccctgccctgcccccgagctgctgggcggacccagcgtgttcctgttcccccccaagcctaaggacaccctgatgatcagcagaacccccgaggtgacctgcgtggtggtggatgtgagccacgaggaccctgaggtgaagttcaactggtacgtggacggcgtggaggtgcacaatgccaagaccaagcccagggaggagcagtacaacagcacctaccgggtggtgtccgtgctgaccgtgctgcaccaggattggctgaacggcaaggagtacaagtgcaaggtgtccaacaaggccctgcctgcccctatcgagaaaaccatcagcaaggccaagggccagcccagagagccccaggtgtacaccctgccccctagcagagatgagctgaccaagaaccaggtgtccctgacctgcctggtgaagggcttctaccccagcgacatcgccgtggagtgggagagcaacggccagcccgagaacaactacaagaccaccccccctgtgctggacagcgatggcagcttcttcctgtacagcaagctgaccgtggacaagagcagatggcagcagggcaacgtgttcagctgcagcgtgatgcacgaggccctgcacaatcactacacccagaagagcctgagcctgtcccctggcaagtga

SEQ ID NO: 515 - DNA, 1026 bp, Artificial Sequence
  Synthetic
gacatccagatgacccagagccccagcagcctgagcgcctctgtgggcgatagagtgaccatcacctgcagagccagccaggccatcgacagctacctgcactggtatcagcagaagcctggcaaggcccctaagctgctgatctacagcgccagcaatctggagaccggcgtgcctagcagattcagcggcagcggctccggcaccgacttcaccctgaccatcagcagcctgctgtacgaggatttcgccacctactactgccagcaggtggtgtggagacctttcaccttcggccagggcaccaaggtggagatcaagcgggtggagcccaagagcagcgataagacccacacctgccccccctgccctgcccccgagctgctgggcggacccagcgtgttcctgttcccccccaagcctaaggacaccctgatgatcagcagaacccccgaggtgacctgcgtggtggtggatgtgagccacgaggaccctgaggtgaagttcaactggtacgtggacggcgtggaggtgcacaatgccaagaccaagcccagggaggagcagtacaacagcacctaccgggtggtgtccgtgctgaccgtgctgcaccaggattggctgaacggcaaggagtacaagtgcaaggtgtccaacaaggccctgcctgcccctatcgagaaaaccatcagcaaggccaagggccagcccagagagccccaggtgtacaccctgccccctagcagagatgagctgaccaagaaccaggtgtccctgacctgcctggtgaagggcttctaccccagcgacatcgccgtggagtgggagagcaacggccagcccgagaacaactacaagaccaccccccctgtgctggacagcgatggcagcttcttcctgtacagcaagctgaccgtggacaagagcagatggcagcagggcaacgtgttcagctgcagcgtgatgcacgaggccctgcacaatcactacacccagaagagcctgagcctgtcccctggcaagtga

SEQ ID NO: 516 - DNA, 1026 bp, Artificial Sequence
  Synthetic
gacatccagatgacccagagccccagcagcctgagcgcctctgtgggcgatagagtgaccatcacctgcagagccagccaggccatcgacagctacctgcactggtatcagcagaagcctggcaaggcccctaagctgctgatctacagcgccagcaatctggagaccggcgtgcctagcagattcagcggcagcggctccggcaccgacttcaccctgaccatcagcagcctgctggacgaggatttcgccacctactactgccagcaggtggtgtggagacctttcaccttcggccagggcaccaaggtggagatcaagcgggtggagcccaagagcagcgataagacccacacctgccccccctgccctgcccccgagctgctgggcggacccagcgtgttcctgttcccccccaagcctaaggacaccctgatgatcagcagaacccccgaggtgacctgcgtggtggtggatgtgagccacgaggaccctgaggtgaagttcaactggtacgtggacggcgtggaggtgcacaatgccaagaccaagcccagggaggagcagtacaacagcacctaccgggtggtgtccgtgctgaccgtgctgcaccaggattggctgaacggcaaggagtacaagtgcaaggtgtccaacaaggccctgcctgcccctatcgagaaaaccatcagcaaggccaagggccagcccagagagccccaggtgtacaccctgccccctagcagagatgagctgaccaagaaccaggtgtccctgacctgcctggtgaagggcttctaccccagcgacatcgccgtggagtgggagagcaacggccagcccgagaacaactacaagaccaccccccctgtgctggacagcgatggcagcttcttcctgtacagcaagctgaccgtggacaagagcagatggcagcagggcaacgtgttcagctgcagcgtgatgcacgaggccctgcacaatcactacacccagaagagcctgagcctgtcccctggcaagtga

SEQ ID NO: 517 - DNA, 1026 bp, Artificial Sequence
  Synthetic
gacatccagatgacccagagccccagcagcctgagcgcctctgtgggcgatagagtgaccatcacctgcagagccagccaggccatcgacagctacctgcactggtatcagcagaagcctggcaaggcccctaagctgctgatctacagcgccagcaatctggagaccggcgtgcctagcagattcagcggcagcggctccggcaccgacttcaccctgaccatcagcagcctgctgcaggaggatttcgccacctactactgccagcaggtggtgtggagacctttcaccttcggccagggcaccaaggtggagatcaagcgggtggagcccaagagcagcgataagacccacacctgccccccctgccctgcccccgagctgctgggcggacccagcgtgttcctgttcccccccaagcctaaggacaccctgatgatcagcagaacccccgaggtgacctgcgtggtggtggatgtgagccacgaggaccctgaggtgaagttcaactggtacgtggacggcgtggaggtgcacaatgccaagaccaagcccagggaggagcagtacaacagcacctaccgggtggtgtccgtgctgaccgtgctgcaccaggattggctgaacggcaaggagtacaagtgcaaggtgtccaacaaggccctgcctgcccctatcgagaaaaccatcagcaaggccaagggccagcccagagagccccaggtgtacaccctgccccctagcagagatgagctgaccaagaaccaggtgtccctgacctgcctggtgaagggcttctaccccagcgacatcgccgtggagtgggagagcaacggccagcccgagaacaactacaagaccaccccccctgtgctggacagcgatggcagcttcttcctgtacagcaagctgaccgtggacaagagcagatggcagcagggcaacgtgttcagctgcagcgtgatgcacgaggccctgcacaatcactacacccagaagagcctgagcctgtcccctggcaagtga

SEQ ID NO: 518 - DNA, 1026 bp, Artificial Sequence
  Synthetic
gacatccagatgacccagagccccagcagcctgagcgcctctgtgggcgatagagtgaccatcacctgcagagccagccaggccatcgacagctacctgcactggtatcagcagaagcctggcaaggcccctaagctgctgatctacagcgccagcaatctggagaccggcgtgcctagcagattcagcggcagcggctccggcaccgacttcaccctgaccatcagcagcctgctgcacgaggatttcgccacctactactgccagcaggtggtgtggagacctttcaccttcggccagggcaccaaggtggagatcaagcgggtggagcccaagagcagcgataagacccacacctgccccccctgccctgcccccgagctgctgggcggacccagcgtgttcctgttcccccccaagcctaaggacaccctgatgatcagcagaacccccgaggtgacctgcgtggtggtggatgtgagccacgaggaccctgaggtgaagttcaactggtacgtggacggcgtggaggtgcacaatgccaagaccaagcccagggaggagcagtacaacagcacctaccgggtggtgtccgtgctgaccgtgctgcaccaggattggctgaacggcaaggagtacaagtgcaaggtgtccaacaaggccctgcctgcccctatcgagaaaaccatcagcaaggccaagggccagcccagagagccccaggtgtacaccctgccccctagcagagatgagctgaccaagaaccaggtgtccctgacctgcctggtgaagggcttctaccccagcgacatcgccgtggagtgggagagcaacggccagcccgagaacaactacaagaccaccccccctgtgctggacagcgatggcagcttcttcctgtacagcaagctgaccgtggacaagagcagatggcagcagggcaacgtgttcagctgcagcgtgatgcacgaggccctgcacaatcactacacccagaagagcctgagcctgtcccctggcaagtga

SEQ ID NO: 519 - DNA, 1026 bp, Artificial Sequence
  Synthetic
gacatccagatgacccagagccccagcagcctgagcgcctctgtgggcgatagagtgaccatcacctgcagagccagccaggccatcgacagctacctgcactggtatcagcagaagcctggcaaggcccctaagctgctgatctacagcgccagcaatctggagaccggcgtgcctagcagattcagcggcagcggctccggcaccgacttcaccctgaccatcagcagcctgctgaaggaggatttcgccacctactactgccagcaggtggtgtggagacctttcaccttcggccagggcaccaaggtggagatcaagcgggtggagcccaagagcagcgataagacccacacctgccccccctgccctgcccccgagctgctgggcggacccagcgtgttcctgttcccccccaagcctaaggacaccctgatgatcagcagaacccccgaggtgacctgcgtggtggtggatgtgagccacgaggaccctgaggtgaagttcaactggtacgtggacggcgtggaggtgcacaatgccaagaccaagcccagggaggagcagtacaacagcacctaccgggtggtgtccgtgctgaccgtgctgcaccaggattggctgaacggcaaggagtacaagtgcaaggtgtccaacaaggccctgcctgcccctatcgagaaaaccatcagcaaggccaagggccagcccagagagccccaggtgtacaccctgccccctagcagagatgagctgaccaagaaccaggtgtccctgacctgcctggtgaagggcttctaccccagcgacatcgccgtggagtgggagagcaacggccagcccgagaacaactacaagaccaccccccctgtgctggacagcgatggcagcttcttcctgtacagcaagctgaccgtggacaagagcagatggcagcagggcaacgtgttcagctgcagcgtgatgcacgaggccctgcacaatcactacacccagaagagcctgagcctgtcccctggcaagtga

SEQ ID NO: 520 - DNA, 1026 bp, Artificial Sequence
  Synthetic
gacatccagatgacccagagccccagcagcctgagcgcctctgtgggcgatagagtgaccatcacctgcagagccagccaggccatcgacagctacctgcactggtatcagcagaagcctggcaaggcccctaagctgctgatctacagcgccagcaatctggagaccggcgtgcctagcagattcagcggcagcggctccggcaccgacttcaccctgaccatcagcagcctgctgcctagcgatttcgccacctactactgccagcaggtggtgtggagacctttcaccttcggccagggcaccaaggtggagatcaagcgggtggagcccaagagcagcgataagacccacacctgccccccctgccctgcccccgagctgctgggcggacccagcgtgttcctgttcccccccaagcctaaggacaccctgatgatcagcagaacccccgaggtgacctgcgtggtggtggatgtgagccacgaggaccctgaggtgaagttcaactggtacgtggacggcgtggaggtgcacaatgccaagaccaagcccagggaggagcagtacaacagcacctaccgggtggtgtccgtgctgaccgtgctgcaccaggattggctgaacggcaaggagtacaagtgcaaggtgtccaacaaggccctgcctgcccctatcgagaaaaccatcagcaaggccaagggccagcccagagagccccaggtgtacaccctgccccctagcagagatgagctgaccaagaaccaggtgtccctgacctgcctggtgaagggcttctaccccagcgacatcgccgtggagtgggagagcaacggccagcccgagaacaactacaagaccaccccccctgtgctggacagcgatggcagcttcttcctgtacagcaagctgaccgtggacaagagcagatggcagcagggcaacgtgttcagctgcagcgtgatgcacgaggccctgcacaatcactacacccagaagagcctgagcctgtcccctggcaagtga

SEQ ID NO: 521 - DNA, 1026 bp, Artificial Sequence
  Synthetic
gacatccagatgacccagagccccagcagcctgagcgcctctgtgggcgatagagtgaccatcacctgcagagccagccaggccatcgacagctacctgcactggtatcagcagaagcctggcaaggcccctaagctgctgatctacagcgccagcaatctggagaccggcgtgcctagcagattcagcggcagcggctccggcaccgacttcaccctgaccatcagcagcctgctgcctctggatttcgccacctactactgccagcaggtggtgtggagacctttcaccttcggccagggcaccaaggtggagatcaagcgggtggagcccaagagcagcgataagacccacacctgccccccctgccctgcccccgagctgctgggcggacccagcgtgttcctgttcccccccaagcctaaggacaccctgatgatcagcagaacccccgaggtgacctgcgtggtggtggatgtgagccacgaggaccctgaggtgaagttcaactggtacgtggacggcgtggaggtgcacaatgccaagaccaagcccagggaggagcagtacaacagcacctaccgggtggtgtccgtgctgaccgtgctgcaccaggattggctgaacggcaaggagtacaagtgcaaggtgtccaacaaggccctgcctgcccctatcgagaaaaccatcagcaaggccaagggccagcccagagagccccaggtgtacaccctgccccctagcagagatgagctgaccaagaaccaggtgtccctgacctgcctggtgaagggcttctaccccagcgacatcgccgtggagtgggagagcaacggccagcccgagaacaactacaagaccaccccccctgtgctggacagcgatggcagcttcttcctgtacagcaagctgaccgtggacaagagcagatggcagcagggcaacgtgttcagctgcagcgtgatgcacgaggccctgcacaatcactacacccagaagagcctgagcctgtcccctggcaagtga

SEQ ID NO: 522 - DNA, 1026 bp, Artificial Sequence
  Synthetic
gacatccagatgacccagagccccagcagcctgagcgcctctgtgggcgatagagtgaccatcacctgcagagccagccaggccatcgacagctacctgcactggtatcagcagaagcctggcaaggcccctaagctgctgatctacagcgccagcaatctggagaccggcgtgcctagcagattcagcggcagcggctccggcaccgacttcaccctgaccatcagcagcctgctgccttacgatttcgccacctactactgccagcaggtggtgtggagacctttcaccttcggccagggcaccaaggtggagatcaagcgggtggagcccaagagcagcgataagacccacacctgccccccctgccctgcccccgagctgctgggcggacccagcgtgttcctgttcccccccaagcctaaggacaccctgatgatcagcagaacccccgaggtgacctgcgtggtggtggatgtgagccacgaggaccctgaggtgaagttcaactggtacgtggacggcgtggaggtgcacaatgccaagaccaagcccagggaggagcagtacaacagcacctaccgggtggtgtccgtgctgaccgtgctgcaccaggattggctgaacggcaaggagtacaagtgcaaggtgtccaacaaggccctgcctgcccctatcgagaaaaccatcagcaaggccaagggccagcccagagagccccaggtgtacaccctgccccctagcagagatgagctgaccaagaaccaggtgtccctgacctgcctggtgaagggcttctaccccagcgacatcgccgtggagtgggagagcaacggccagcccgagaacaactacaagaccaccccccctgtgctggacagcgatggcagcttcttcctgtacagcaagctgaccgtggacaagagcagatggcagcagggcaacgtgttcagctgcagcgtgatgcacgaggccctgcacaatcactacacccagaagagcctgagcctgtcccctggcaagtga

SEQ ID NO: 523 - DNA, 1026 bp, Artificial Sequence
  Synthetic
gacatccagatgacccagagccccagcagcctgagcgcctctgtgggcgatagagtgaccatcacctgcagagccagccaggccatcgacagctacctgcactggtatcagcagaagcctggcaaggcccctaagctgctgatctacagcgccagcaatctggagaccggcgtgcctagcagattcagcggcagcggctccggcaccgacttcaccctgaccatcagcagcctgctgcctgacgatttcgccacctactactgccagcaggtggtgtggagacctttcaccttcggccagggcaccaaggtggagatcaagcgggtggagcccaagagcagcgataagacccacacctgccccccctgccctgcccccgagctgctgggcggacccagcgtgttcctgttcccccccaagcctaaggacaccctgatgatcagcagaacccccgaggtgacctgcgtggtggtggatgtgagccacgaggaccctgaggtgaagttcaactggtacgtggacggcgtggaggtgcacaatgccaagaccaagcccagggaggagcagtacaacagcacctaccgggtggtgtccgtgctgaccgtgctgcaccaggattggctgaacggcaaggagtacaagtgcaaggtgtccaacaaggccctgcctgcccctatcgagaaaaccatcagcaaggccaagggccagcccagagagccccaggtgtacaccctgccccctagcagagatgagctgaccaagaaccaggtgtccctgacctgcctggtgaagggcttctaccccagcgacatcgccgtggagtgggagagcaacggccagcccgagaacaactacaagaccaccccccctgtgctggacagcgatggcagcttcttcctgtacagcaagctgaccgtggacaagagcagatggcagcagggcaacgtgttcagctgcagcgtgatgcacgaggccctgcacaatcactacacccagaagagcctgagcctgtcccctggcaagtga

SEQ ID NO: 524 - DNA, 1026 bp, Artificial Sequence
  Synthetic
gacatccagatgacccagagccccagcagcctgagcgcctctgtgggcgatagagtgaccatcacctgcagagccagccaggccatcgacagctacctgcactggtatcagcagaagcctggcaaggcccctaagctgctgatctacagcgccagcaatctggagaccggcgtgcctagcagattcagcggcagcggctccggcaccgacttcaccctgaccatcagcagcctgctgcctcaggatttcgccacctactactgccagcaggtggtgtggagacctttcaccttcggccagggcaccaaggtggagatcaagcgggtggagcccaagagcagcgataagacccacacctgccccccctgccctgcccccgagctgctgggcggacccagcgtgttcctgttcccccccaagcctaaggacaccctgatgatcagcagaacccccgaggtgacctgcgtggtggtggatgtgagccacgaggaccctgaggtgaagttcaactggtacgtggacggcgtggaggtgcacaatgccaagaccaagcccagggaggagcagtacaacagcacctaccgggtggtgtccgtgctgaccgtgctgcaccaggattggctgaacggcaaggagtacaagtgcaaggtgtccaacaaggccctgcctgcccctatcgagaaaaccatcagcaaggccaagggccagcccagagagccccaggtgtacaccctgccccctagcagagatgagctgaccaagaaccaggtgtccctgacctgcctggtgaagggcttctaccccagcgacatcgccgtggagtgggagagcaacggccagcccgagaacaactacaagaccaccccccctgtgctggacagcgatggcagcttcttcctgtacagcaagctgaccgtggacaagagcagatggcagcagggcaacgtgttcagctgcagcgtgatgcacgaggccctgcacaatcactacacccagaagagcctgagcctgtcccctggcaagtga

SEQ ID NO: 525 - DNA, 1026 bp, Artificial Sequence
  Synthetic
gacatccagatgacccagagccccagcagcctgagcgcctctgtgggcgatagagtgaccatcacctgcagagccagccaggccatcgacagctacctgcactggtatcagcagaagcctggcaaggcccctaagctgctgatctacagcgccagcaatctggagaccggcgtgcctagcagattcagcggcagcggctccggcaccgacttcaccctgaccatcagcagcctgctgcctcacgatttcgccacctactactgccagcaggtggtgtggagacctttcaccttcggccagggcaccaaggtggagatcaagcgggtggagcccaagagcagcgataagacccacacctgccccccctgccctgcccccgagctgctgggcggacccagcgtgttcctgttcccccccaagcctaaggacaccctgatgatcagcagaacccccgaggtgacctgcgtggtggtggatgtgagccacgaggaccctgaggtgaagttcaactggtacgtggacggcgtggaggtgcacaatgccaagaccaagcccagggaggagcagtacaacagcacctaccgggtggtgtccgtgctgaccgtgctgcaccaggattggctgaacggcaaggagtacaagtgcaaggtgtccaacaaggccctgcctgcccctatcgagaaaaccatcagcaaggccaagggccagcccagagagccccaggtgtacaccctgccccctagcagagatgagctgaccaagaaccaggtgtccctgacctgcctggtgaagggcttctaccccagcgacatcgccgtggagtgggagagcaacggccagcccgagaacaactacaagaccaccccccctgtgctggacagcgatggcagcttcttcctgtacagcaagctgaccgtggacaagagcagatggcagcagggcaacgtgttcagctgcagcgtgatgcacgaggccctgcacaatcactacacccagaagagcctgagcctgtcccctggcaagtga

SEQ ID NO: 526 - DNA, 1026 bp, Artificial Sequence
  Synthetic
gacatccagatgacccagagccccagcagcctgagcgcctctgtgggcgatagagtgaccatcacctgcagagccagccaggccatcgacagctacctgcactggtatcagcagaagcctggcaaggcccctaagctgctgatctacagcgccagcaatctggagaccggcgtgcctagcagattcagcggcagcggctccggcaccgacttcaccctgaccatcagcagcctgctgcctcccgatttcgccacctactactgccagcaggtggtgtggagacctttcaccttcggccagggcaccaaggtggagatcaagcgggtggagcccaagagcagcgataagacccacacctgccccccctgccctgcccccgagctgctgggcggacccagcgtgttcctgttcccccccaagcctaaggacaccctgatgatcagcagaacccccgaggtgacctgcgtggtggtggatgtgagccacgaggaccctgaggtgaagttcaactggtacgtggacggcgtggaggtgcacaatgccaagaccaagcccagggaggagcagtacaacagcacctaccgggtggtgtccgtgctgaccgtgctgcaccaggattggctgaacggcaaggagtacaagtgcaaggtgtccaacaaggccctgcctgcccctatcgagaaaaccatcagcaaggccaagggccagcccagagagccccaggtgtacaccctgccccctagcagagatgagctgaccaagaaccaggtgtccctgacctgcctggtgaagggcttctaccccagcgacatcgccgtggagtgggagagcaacggccagcccgagaacaactacaagaccaccccccctgtgctggacagcgatggcagcttcttcctgtacagcaagctgaccgtggacaagagcagatggcagcagggcaacgtgttcagctgcagcgtgatgcacgaggccctgcacaatcactacacccagaagagcctgagcctgtcccctggcaagtga

SEQ ID NO: 527 - DNA, 1026 bp, Artificial Sequence
  Synthetic
gacatccagatgacccagagccccagcagcctgagcgcctctgtgggcgatagagtgaccatcacctgcagagccagccaggccatcgacagctacctgcactggtatcagcagaagcctggcaaggcccctaagctgctgatctacagcgccagcaatctggagaccggcgtgcctagcagattcagcggcagcggctccggcaccgacttcaccctgaccatcagcagcctgctgcctaaggatttcgccacctactactgccagcaggtggtgtggagacctttcaccttcggccagggcaccaaggtggagatcaagcgggtggagcccaagagcagcgataagacccacacctgccccccctgccctgcccccgagctgctgggcggacccagcgtgttcctgttcccccccaagcctaaggacaccctgatgatcagcagaacccccgaggtgacctgcgtggtggtggatgtgagccacgaggaccctgaggtgaagttcaactggtacgtggacggcgtggaggtgcacaatgccaagaccaagcccagggaggagcagtacaacagcacctaccgggtggtgtccgtgctgaccgtgctgcaccaggattggctgaacggcaaggagtacaagtgcaaggtgtccaacaaggccctgcctgcccctatcgagaaaaccatcagcaaggccaagggccagcccagagagccccaggtgtacaccctgccccctagcagagatgagctgaccaagaaccaggtgtccctgacctgcctggtgaagggcttctaccccagcgacatcgccgtggagtgggagagcaacggccagcccgagaacaactacaagaccaccccccctgtgctggacagcgatggcagcttcttcctgtacagcaagctgaccgtggacaagagcagatggcagcagggcaacgtgttcagctgcagcgtgatgcacgaggccctgcacaatcactacacccagaagagcctgagcctgtcccctggcaagtga

SEQ ID NO: 528 - DNA, 1026 bp, Artificial Sequence
  Synthetic
gacatccagatgacccagagccccagcagcctgagcgcctctgtgggcgatagagtgaccatcacctgcagagccagccaggccatcgacagctacctgcactggtatcagcagaagcctggcaaggcccctaagctgctgatctacagcgccagcaatctggagaccggcgtgcctagcagattcagcggcagcggctccggcaccgacttcaccctgaccatcagcagcctgctgcctgagagcttcgccacctactactgccagcaggtggtgtggagacctttcaccttcggccagggcaccaaggtggagatcaagcgggtggagcccaagagcagcgataagacccacacctgccccccctgccctgcccccgagctgctgggcggacccagcgtgttcctgttcccccccaagcctaaggacaccctgatgatcagcagaacccccgaggtgacctgcgtggtggtggatgtgagccacgaggaccctgaggtgaagttcaactggtacgtggacggcgtggaggtgcacaatgccaagaccaagcccagggaggagcagtacaacagcacctaccgggtggtgtccgtgctgaccgtgctgcaccaggattggctgaacggcaaggagtacaagtgcaaggtgtccaacaaggccctgcctgcccctatcgagaaaaccatcagcaaggccaagggccagcccagagagccccaggtgtacaccctgccccctagcagagatgagctgaccaagaaccaggtgtccctgacctgcctggtgaagggcttctaccccagcgacatcgccgtggagtgggagagcaacggccagcccgagaacaactacaagaccaccccccctgtgctggacagcgatggcagcttcttcctgtacagcaagctgaccgtggacaagagcagatggcagcagggcaacgtgttcagctgcagcgtgatgcacgaggccctgcacaatcactacacccagaagagcctgagcctgtcccctggcaagtga

SEQ ID NO: 529 - DNA, 1026 bp, Artificial Sequence
  Synthetic
gacatccagatgacccagagccccagcagcctgagcgcctctgtgggcgatagagtgaccatcacctgcagagccagccaggccatcgacagctacctgcactggtatcagcagaagcctggcaaggcccctaagctgctgatctacagcgccagcaatctggagaccggcgtgcctagcagattcagcggcagcggctccggcaccgacttcaccctgaccatcagcagcctgctgcctgagctgttcgccacctactactgccagcaggtggtgtggagacctttcaccttcggccagggcaccaaggtggagatcaagcgggtggagcccaagagcagcgataagacccacacctgccccccctgccctgcccccgagctgctgggcggacccagcgtgttcctgttcccccccaagcctaaggacaccctgatgatcagcagaacccccgaggtgacctgcgtggtggtggatgtgagccacgaggaccctgaggtgaagttcaactggtacgtggacggcgtggaggtgcacaatgccaagaccaagcccagggaggagcagtacaacagcacctaccgggtggtgtccgtgctgaccgtgctgcaccaggattggctgaacggcaaggagtacaagtgcaaggtgtccaacaaggccctgcctgcccctatcgagaaaaccatcagcaaggccaagggccagcccagagagccccaggtgtacaccctgccccctagcagagatgagctgaccaagaaccaggtgtccctgacctgcctggtgaagggcttctaccccagcgacatcgccgtggagtgggagagcaacggccagcccgagaacaactacaagaccaccccccctgtgctggacagcgatggcagcttcttcctgtacagcaagctgaccgtggacaagagcagatggcagcagggcaacgtgttcagctgcagcgtgatgcacgaggccctgcacaatcactacacccagaagagcctgagcctgtcccctggcaagtga

SEQ ID NO: 530 - DNA, 1026 bp, Artificial Sequence
  Synthetic
gacatccagatgacccagagccccagcagcctgagcgcctctgtgggcgatagagtgaccatcacctgcagagccagccaggccatcgacagctacctgcactggtatcagcagaagcctggcaaggcccctaagctgctgatctacagcgccagcaatctggagaccggcgtgcctagcagattcagcggcagcggctccggcaccgacttcaccctgaccatcagcagcctgctgcctgagtacttcgccacctactactgccagcaggtggtgtggagacctttcaccttcggccagggcaccaaggtggagatcaagcgggtggagcccaagagcagcgataagacccacacctgccccccctgccctgcccccgagctgctgggcggacccagcgtgttcctgttcccccccaagcctaaggacaccctgatgatcagcagaacccccgaggtgacctgcgtggtggtggatgtgagccacgaggaccctgaggtgaagttcaactggtacgtggacggcgtggaggtgcacaatgccaagaccaagcccagggaggagcagtacaacagcacctaccgggtggtgtccgtgctgaccgtgctgcaccaggattggctgaacggcaaggagtacaagtgcaaggtgtccaacaaggccctgcctgcccctatcgagaaaaccatcagcaaggccaagggccagcccagagagccccaggtgtacaccctgccccctagcagagatgagctgaccaagaaccaggtgtccctgacctgcctggtgaagggcttctaccccagcgacatcgccgtggagtgggagagcaacggccagcccgagaacaactacaagaccaccccccctgtgctggacagcgatggcagcttcttcctgtacagcaagctgaccgtggacaagagcagatggcagcagggcaacgtgttcagctgcagcgtgatgcacgaggccctgcacaatcactacacccagaagagcctgagcctgtcccctggcaagtga

SEQ ID NO: 531 - DNA, 1026 bp, Artificial Sequence
  Synthetic
gacatccagatgacccagagccccagcagcctgagcgcctctgtgggcgatagagtgaccatcacctgcagagccagccaggccatcgacagctacctgcactggtatcagcagaagcctggcaaggcccctaagctgctgatctacagcgccagcaatctggagaccggcgtgcctagcagattcagcggcagcggctccggcaccgacttcaccctgaccatcagcagcctgctgcctgagcagttcgccacctactactgccagcaggtggtgtggagacctttcaccttcggccagggcaccaaggtggagatcaagcgggtggagcccaagagcagcgataagacccacacctgccccccctgccctgcccccgagctgctgggcggacccagcgtgttcctgttcccccccaagcctaaggacaccctgatgatcagcagaacccccgaggtgacctgcgtggtggtggatgtgagccacgaggaccctgaggtgaagttcaactggtacgtggacggcgtggaggtgcacaatgccaagaccaagcccagggaggagcagtacaacagcacctaccgggtggtgtccgtgctgaccgtgctgcaccaggattggctgaacggcaaggagtacaagtgcaaggtgtccaacaaggccctgcctgcccctatcgagaaaaccatcagcaaggccaagggccagcccagagagccccaggtgtacaccctgccccctagcagagatgagctgaccaagaaccaggtgtccctgacctgcctggtgaagggcttctaccccagcgacatcgccgtggagtgggagagcaacggccagcccgagaacaactacaagaccaccccccctgtgctggacagcgatggcagcttcttcctgtacagcaagctgaccgtggacaagagcagatggcagcagggcaacgtgttcagctgcagcgtgatgcacgaggccctgcacaatcactacacccagaagagcctgagcctgtcccctggcaagtga

SEQ ID NO: 532 - DNA, 1026 bp, Artificial Sequence
  Synthetic
gacatccagatgacccagagccccagcagcctgagcgcctctgtgggcgatagagtgaccatcacctgcagagccagccaggccatcgacagctacctgcactggtatcagcagaagcctggcaaggcccctaagctgctgatctacagcgccagcaatctggagaccggcgtgcctagcagattcagcggcagcggctccggcaccgacttcaccctgaccatcagcagcctgctgcctgagcacttcgccacctactactgccagcaggtggtgtggagacctttcaccttcggccagggcaccaaggtggagatcaagcgggtggagcccaagagcagcgataagacccacacctgccccccctgccctgcccccgagctgctgggcggacccagcgtgttcctgttcccccccaagcctaaggacaccctgatgatcagcagaacccccgaggtgacctgcgtggtggtggatgtgagccacgaggaccctgaggtgaagttcaactggtacgtggacggcgtggaggtgcacaatgccaagaccaagcccagggaggagcagtacaacagcacctaccgggtggtgtccgtgctgaccgtgctgcaccaggattggctgaacggcaaggagtacaagtgcaaggtgtccaacaaggccctgcctgcccctatcgagaaaaccatcagcaaggccaagggccagcccagagagccccaggtgtacaccctgccccctagcagagatgagctgaccaagaaccaggtgtccctgacctgcctggtgaagggcttctaccccagcgacatcgccgtggagtgggagagcaacggccagcccgagaacaactacaagaccaccccccctgtgctggacagcgatggcagcttcttcctgtacagcaagctgaccgtggacaagagcagatggcagcagggcaacgtgttcagctgcagcgtgatgcacgaggccctgcacaatcactacacccagaagagcctgagcctgtcccctggcaagtga

SEQ ID NO: 533 - DNA, 1026 bp, Artificial Sequence
  Synthetic
gacatccagatgacccagagccccagcagcctgagcgcctctgtgggcgatagagtgaccatcacctgcagagccagccaggccatcgacagctacctgcactggtatcagcagaagcctggcaaggcccctaagctgctgatctacagcgccagcaatctggagaccggcgtgcctagcagattcagcggcagcggctccggcaccgacttcaccctgaccatcagcagcctgctgcctgagcccttcgccacctactactgccagcaggtggtgtggagacctttcaccttcggccagggcaccaaggtggagatcaagcgggtggagcccaagagcagcgataagacccacacctgccccccctgccctgcccccgagctgctgggcggacccagcgtgttcctgttcccccccaagcctaaggacaccctgatgatcagcagaacccccgaggtgacctgcgtggtggtggatgtgagccacgaggaccctgaggtgaagttcaactggtacgtggacggcgtggaggtgcacaatgccaagaccaagcccagggaggagcagtacaacagcacctaccgggtggtgtccgtgctgaccgtgctgcaccaggattggctgaacggcaaggagtacaagtgcaaggtgtccaacaaggccctgcctgcccctatcgagaaaaccatcagcaaggccaagggccagcccagagagccccaggtgtacaccctgccccctagcagagatgagctgaccaagaaccaggtgtccctgacctgcctggtgaagggcttctaccccagcgacatcgccgtggagtgggagagcaacggccagcccgagaacaactacaagaccaccccccctgtgctggacagcgatggcagcttcttcctgtacagcaagctgaccgtggacaagagcagatggcagcagggcaacgtgttcagctgcagcgtgatgcacgaggccctgcacaatcactacacccagaagagcctgagcctgtcccctggcaagtga

SEQ ID NO: 534 - DNA, 1026 bp, Artificial Sequence
  Synthetic
gacatccagatgacccagagccccagcagcctgagcgcctctgtgggcgatagagtgaccatcacctgcagagccagccaggccatcgacagctacctgcactggtatcagcagaagcctggcaaggcccctaagctgctgatctacagcgccagcaatctggagaccggcgtgcctagcagattcagcggcagcggctccggcaccgacttcaccctgaccatcagcagcctgctgcctgagaagttcgccacctactactgccagcaggtggtgtggagacctttcaccttcggccagggcaccaaggtggagatcaagcgggtggagcccaagagcagcgataagacccacacctgccccccctgccctgcccccgagctgctgggcggacccagcgtgttcctgttcccccccaagcctaaggacaccctgatgatcagcagaacccccgaggtgacctgcgtggtggtggatgtgagccacgaggaccctgaggtgaagttcaactggtacgtggacggcgtggaggtgcacaatgccaagaccaagcccagggaggagcagtacaacagcacctaccgggtggtgtccgtgctgaccgtgctgcaccaggattggctgaacggcaaggagtacaagtgcaaggtgtccaacaaggccctgcctgcccctatcgagaaaaccatcagcaaggccaagggccagcccagagagccccaggtgtacaccctgccccctagcagagatgagctgaccaagaaccaggtgtccctgacctgcctggtgaagggcttctaccccagcgacatcgccgtggagtgggagagcaacggccagcccgagaacaactacaagaccaccccccctgtgctggacagcgatggcagcttcttcctgtacagcaagctgaccgtggacaagagcagatggcagcagggcaacgtgttcagctgcagcgtgatgcacgaggccctgcacaatcactacacccagaagagcctgagcctgtcccctggcaagtga

SEQ ID NO: 535 - DNA, 1026 bp, Artificial Sequence
  Synthetic
gacatccagatgacccagagccccagcagcctgagcgcctctgtgggcgatagagtgaccatcacctgcagagccagccaggccatcgacagctacctgcactggtatcagcagaagcctggcaaggcccctaagctgctgatctacagcgccagcaatctggagaccggcgtgcctagcagattcagcggcagcggctccggcaccgacttcaccctgaccatcagcagcctgctgcctgaggatttcagcacctactactgccagcaggtggtgtggagacctttcaccttcggccagggcaccaaggtggagatcaagcgggtggagcccaagagcagcgataagacccacacctgccccccctgccctgcccccgagctgctgggcggacccagcgtgttcctgttcccccccaagcctaaggacaccctgatgatcagcagaacccccgaggtgacctgcgtggtggtggatgtgagccacgaggaccctgaggtgaagttcaactggtacgtggacggcgtggaggtgcacaatgccaagaccaagcccagggaggagcagtacaacagcacctaccgggtggtgtccgtgctgaccgtgctgcaccaggattggctgaacggcaaggagtacaagtgcaaggtgtccaacaaggccctgcctgcccctatcgagaaaaccatcagcaaggccaagggccagcccagagagccccaggtgtacaccctgccccctagcagagatgagctgaccaagaaccaggtgtccctgacctgcctggtgaagggcttctaccccagcgacatcgccgtggagtgggagagcaacggccagcccgagaacaactacaagaccaccccccctgtgctggacagcgatggcagcttcttcctgtacagcaagctgaccgtggacaagagcagatggcagcagggcaacgtgttcagctgcagcgtgatgcacgaggccctgcacaatcactacacccagaagagcctgagcctgtcccctggcaagtga

SEQ ID NO: 536 - DNA, 1026 bp, Artificial Sequence
  Synthetic
gacatccagatgacccagagccccagcagcctgagcgcctctgtgggcgatagagtgaccatcacctgcagagccagccaggccatcgacagctacctgcactggtatcagcagaagcctggcaaggcccctaagctgctgatctacagcgccagcaatctggagaccggcgtgcctagcagattcagcggcagcggctccggcaccgacttcaccctgaccatcagcagcctgctgcctgaggatttcctgacctactactgccagcaggtggtgtggagacctttcaccttcggccagggcaccaaggtggagatcaagcgggtggagcccaagagcagcgataagacccacacctgccccccctgccctgcccccgagctgctgggcggacccagcgtgttcctgttcccccccaagcctaaggacaccctgatgatcagcagaacccccgaggtgacctgcgtggtggtggatgtgagccacgaggaccctgaggtgaagttcaactggtacgtggacggcgtggaggtgcacaatgccaagaccaagcccagggaggagcagtacaacagcacctaccgggtggtgtccgtgctgaccgtgctgcaccaggattggctgaacggcaaggagtacaagtgcaaggtgtccaacaaggccctgcctgcccctatcgagaaaaccatcagcaaggccaagggccagcccagagagccccaggtgtacaccctgccccctagcagagatgagctgaccaagaaccaggtgtccctgacctgcctggtgaagggcttctaccccagcgacatcgccgtggagtgggagagcaacggccagcccgagaacaactacaagaccaccccccctgtgctggacagcgatggcagcttcttcctgtacagcaagctgaccgtggacaagagcagatggcagcagggcaacgtgttcagctgcagcgtgatgcacgaggccctgcacaatcactacacccagaagagcctgagcctgtcccctggcaagtga

SEQ ID NO: 537 - DNA, 1026 bp, Artificial Sequence
  Synthetic
gacatccagatgacccagagccccagcagcctgagcgcctctgtgggcgatagagtgaccatcacctgcagagccagccaggccatcgacagctacctgcactggtatcagcagaagcctggcaaggcccctaagctgctgatctacagcgccagcaatctggagaccggcgtgcctagcagattcagcggcagcggctccggcaccgacttcaccctgaccatcagcagcctgctgcctgaggatttctacacctactactgccagcaggtggtgtggagacctttcaccttcggccagggcaccaaggtggagatcaagcgggtggagcccaagagcagcgataagacccacacctgccccccctgccctgcccccgagctgctgggcggacccagcgtgttcctgttcccccccaagcctaaggacaccctgatgatcagcagaacccccgaggtgacctgcgtggtggtggatgtgagccacgaggaccctgaggtgaagttcaactggtacgtggacggcgtggaggtgcacaatgccaagaccaagcccagggaggagcagtacaacagcacctaccgggtggtgtccgtgctgaccgtgctgcaccaggattggctgaacggcaaggagtacaagtgcaaggtgtccaacaaggccctgcctgcccctatcgagaaaaccatcagcaaggccaagggccagcccagagagccccaggtgtacaccctgccccctagcagagatgagctgaccaagaaccaggtgtccctgacctgcctggtgaagggcttctaccccagcgacatcgccgtggagtgggagagcaacggccagcccgagaacaactacaagaccaccccccctgtgctggacagcgatggcagcttcttcctgtacagcaagctgaccgtggacaagagcagatggcagcagggcaacgtgttcagctgcagcgtgatgcacgaggccctgcacaatcactacacccagaagagcctgagcctgtcccctggcaagtga

SEQ ID NO: 538 - DNA, 1026 bp, Artificial Sequence
  Synthetic
gacatccagatgacccagagccccagcagcctgagcgcctctgtgggcgatagagtgaccatcacctgcagagccagccaggccatcgacagctacctgcactggtatcagcagaagcctggcaaggcccctaagctgctgatctacagcgccagcaatctggagaccggcgtgcctagcagattcagcggcagcggctccggcaccgacttcaccctgaccatcagcagcctgctgcctgaggatttcgacacctactactgccagcaggtggtgtggagacctttcaccttcggccagggcaccaaggtggagatcaagcgggtggagcccaagagcagcgataagacccacacctgccccccctgccctgcccccgagctgctgggcggacccagcgtgttcctgttcccccccaagcctaaggacaccctgatgatcagcagaacccccgaggtgacctgcgtggtggtggatgtgagccacgaggaccctgaggtgaagttcaactggtacgtggacggcgtggaggtgcacaatgccaagaccaagcccagggaggagcagtacaacagcacctaccgggtggtgtccgtgctgaccgtgctgcaccaggattggctgaacggcaaggagtacaagtgcaaggtgtccaacaaggccctgcctgcccctatcgagaaaaccatcagcaaggccaagggccagcccagagagccccaggtgtacaccctgccccctagcagagatgagctgaccaagaaccaggtgtccctgacctgcctggtgaagggcttctaccccagcgacatcgccgtggagtgggagagcaacggccagcccgagaacaactacaagaccaccccccctgtgctggacagcgatggcagcttcttcctgtacagcaagctgaccgtggacaagagcagatggcagcagggcaacgtgttcagctgcagcgtgatgcacgaggccctgcacaatcactacacccagaagagcctgagcctgtcccctggcaagtga

SEQ ID NO: 539 - DNA, 1026 bp, Artificial Sequence
  Synthetic
gacatccagatgacccagagccccagcagcctgagcgcctctgtgggcgatagagtgaccatcacctgcagagccagccaggccatcgacagctacctgcactggtatcagcagaagcctggcaaggcccctaagctgctgatctacagcgccagcaatctggagaccggcgtgcctagcagattcagcggcagcggctccggcaccgacttcaccctgaccatcagcagcctgctgcctgaggatttccagacctactactgccagcaggtggtgtggagacctttcaccttcggccagggcaccaaggtggagatcaagcgggtggagcccaagagcagcgataagacccacacctgccccccctgccctgcccccgagctgctgggcggacccagcgtgttcctgttcccccccaagcctaaggacaccctgatgatcagcagaacccccgaggtgacctgcgtggtggtggatgtgagccacgaggaccctgaggtgaagttcaactggtacgtggacggcgtggaggtgcacaatgccaagaccaagcccagggaggagcagtacaacagcacctaccgggtggtgtccgtgctgaccgtgctgcaccaggattggctgaacggcaaggagtacaagtgcaaggtgtccaacaaggccctgcctgcccctatcgagaaaaccatcagcaaggccaagggccagcccagagagccccaggtgtacaccctgccccctagcagagatgagctgaccaagaaccaggtgtccctgacctgcctggtgaagggcttctaccccagcgacatcgccgtggagtgggagagcaacggccagcccgagaacaactacaagaccaccccccctgtgctggacagcgatggcagcttcttcctgtacagcaagctgaccgtggacaagagcagatggcagcagggcaacgtgttcagctgcagcgtgatgcacgaggccctgcacaatcactacacccagaagagcctgagcctgtcccctggcaagtga

SEQ ID NO: 540 - DNA, 1026 bp, Artificial Sequence
  Synthetic
gacatccagatgacccagagccccagcagcctgagcgcctctgtgggcgatagagtgaccatcacctgcagagccagccaggccatcgacagctacctgcactggtatcagcagaagcctggcaaggcccctaagctgctgatctacagcgccagcaatctggagaccggcgtgcctagcagattcagcggcagcggctccggcaccgacttcaccctgaccatcagcagcctgctgcctgaggatttccacacctactactgccagcaggtggtgtggagacctttcaccttcggccagggcaccaaggtggagatcaagcgggtggagcccaagagcagcgataagacccacacctgccccccctgccctgcccccgagctgctgggcggacccagcgtgttcctgttcccccccaagcctaaggacaccctgatgatcagcagaacccccgaggtgacctgcgtggtggtggatgtgagccacgaggaccctgaggtgaagttcaactggtacgtggacggcgtggaggtgcacaatgccaagaccaagcccagggaggagcagtacaacagcacctaccgggtggtgtccgtgctgaccgtgctgcaccaggattggctgaacggcaaggagtacaagtgcaaggtgtccaacaaggccctgcctgcccctatcgagaaaaccatcagcaaggccaagggccagcccagagagccccaggtgtacaccctgccccctagcagagatgagctgaccaagaaccaggtgtccctgacctgcctggtgaagggcttctaccccagcgacatcgccgtggagtgggagagcaacggccagcccgagaacaactacaagaccaccccccctgtgctggacagcgatggcagcttcttcctgtacagcaagctgaccgtggacaagagcagatggcagcagggcaacgtgttcagctgcagcgtgatgcacgaggccctgcacaatcactacacccagaagagcctgagcctgtcccctggcaagtga

SEQ ID NO: 541 - DNA, 1026 bp, Artificial Sequence
  Synthetic
gacatccagatgacccagagccccagcagcctgagcgcctctgtgggcgatagagtgaccatcacctgcagagccagccaggccatcgacagctacctgcactggtatcagcagaagcctggcaaggcccctaagctgctgatctacagcgccagcaatctggagaccggcgtgcctagcagattcagcggcagcggctccggcaccgacttcaccctgaccatcagcagcctgctgcctgaggatttccccacctactactgccagcaggtggtgtggagacctttcaccttcggccagggcaccaaggtggagatcaagcgggtggagcccaagagcagcgataagacccacacctgccccccctgccctgcccccgagctgctgggcggacccagcgtgttcctgttcccccccaagcctaaggacaccctgatgatcagcagaacccccgaggtgacctgcgtggtggtggatgtgagccacgaggaccctgaggtgaagttcaactggtacgtggacggcgtggaggtgcacaatgccaagaccaagcccagggaggagcagtacaacagcacctaccgggtggtgtccgtgctgaccgtgctgcaccaggattggctgaacggcaaggagtacaagtgcaaggtgtccaacaaggccctgcctgcccctatcgagaaaaccatcagcaaggccaagggccagcccagagagccccaggtgtacaccctgccccctagcagagatgagctgaccaagaaccaggtgtccctgacctgcctggtgaagggcttctaccccagcgacatcgccgtggagtgggagagcaacggccagcccgagaacaactacaagaccaccccccctgtgctggacagcgatggcagcttcttcctgtacagcaagctgaccgtggacaagagcagatggcagcagggcaacgtgttcagctgcagcgtgatgcacgaggccctgcacaatcactacacccagaagagcctgagcctgtcccctggcaagtga

SEQ ID NO: 542 - DNA, 1026 bp, Artificial Sequence
  Synthetic
gacatccagatgacccagagccccagcagcctgagcgcctctgtgggcgatagagtgaccatcacctgcagagccagccaggccatcgacagctacctgcactggtatcagcagaagcctggcaaggcccctaagctgctgatctacagcgccagcaatctggagaccggcgtgcctagcagattcagcggcagcggctccggcaccgacttcaccctgaccatcagcagcctgctgcctgaggatttcaagacctactactgccagcaggtggtgtggagacctttcaccttcggccagggcaccaaggtggagatcaagcgggtggagcccaagagcagcgataagacccacacctgccccccctgccctgcccccgagctgctgggcggacccagcgtgttcctgttcccccccaagcctaaggacaccctgatgatcagcagaacccccgaggtgacctgcgtggtggtggatgtgagccacgaggaccctgaggtgaagttcaactggtacgtggacggcgtggaggtgcacaatgccaagaccaagcccagggaggagcagtacaacagcacctaccgggtggtgtccgtgctgaccgtgctgcaccaggattggctgaacggcaaggagtacaagtgcaaggtgtccaacaaggccctgcctgcccctatcgagaaaaccatcagcaaggccaagggccagcccagagagccccaggtgtacaccctgccccctagcagagatgagctgaccaagaaccaggtgtccctgacctgcctggtgaagggcttctaccccagcgacatcgccgtggagtgggagagcaacggccagcccgagaacaactacaagaccaccccccctgtgctggacagcgatggcagcttcttcctgtacagcaagctgaccgtggacaagagcagatggcagcagggcaacgtgttcagctgcagcgtgatgcacgaggccctgcacaatcactacacccagaagagcctgagcctgtcccctggcaagtga

SEQ ID NO: 543 - DNA, 1026 bp, Artificial Sequence
  Synthetic
gacatccagatgacccagagccccagcagcctgagcgcctctgtgggcgatagagtgaccatcacctgcagagccagccaggccatcgacagctacctgcactggtatcagcagaagcctggcaaggcccctaagctgctgatctacagcgccagcaatctggagaccggcgtgcctagcagattcagcggcagcggctccggcaccgacttcaccctgaccatcagcagcctgctgcctgaggatttcgccctgtactactgccagcaggtggtgtggagacctttcaccttcggccagggcaccaaggtggagatcaagcgggtggagcccaagagcagcgataagacccacacctgccccccctgccctgcccccgagctgctgggcggacccagcgtgttcctgttcccccccaagcctaaggacaccctgatgatcagcagaacccccgaggtgacctgcgtggtggtggatgtgagccacgaggaccctgaggtgaagttcaactggtacgtggacggcgtggaggtgcacaatgccaagaccaagcccagggaggagcagtacaacagcacctaccgggtggtgtccgtgctgaccgtgctgcaccaggattggctgaacggcaaggagtacaagtgcaaggtgtccaacaaggccctgcctgcccctatcgagaaaaccatcagcaaggccaagggccagcccagagagccccaggtgtacaccctgccccctagcagagatgagctgaccaagaaccaggtgtccctgacctgcctggtgaagggcttctaccccagcgacatcgccgtggagtgggagagcaacggccagcccgagaacaactacaagaccaccccccctgtgctggacagcgatggcagcttcttcctgtacagcaagctgaccgtggacaagagcagatggcagcagggcaacgtgttcagctgcagcgtgatgcacgaggccctgcacaatcactacacccagaagagcctgagcctgtcccctggcaagtga

SEQ ID NO: 544 - DNA, 1026 bp, Artificial Sequence
  Synthetic
gacatccagatgacccagagccccagcagcctgagcgcctctgtgggcgatagagtgaccatcacctgcagagccagccaggccatcgacagctacctgcactggtatcagcagaagcctggcaaggcccctaagctgctgatctacagcgccagcaatctggagaccggcgtgcctagcagattcagcggcagcggctccggcaccgacttcaccctgaccatcagcagcctgctgcctgaggatttcgccgactactactgccagcaggtggtgtggagacctttcaccttcggccagggcaccaaggtggagatcaagcgggtggagcccaagagcagcgataagacccacacctgccccccctgccctgcccccgagctgctgggcggacccagcgtgttcctgttcccccccaagcctaaggacaccctgatgatcagcagaacccccgaggtgacctgcgtggtggtggatgtgagccacgaggaccctgaggtgaagttcaactggtacgtggacggcgtggaggtgcacaatgccaagaccaagcccagggaggagcagtacaacagcacctaccgggtggtgtccgtgctgaccgtgctgcaccaggattggctgaacggcaaggagtacaagtgcaaggtgtccaacaaggccctgcctgcccctatcgagaaaaccatcagcaaggccaagggccagcccagagagccccaggtgtacaccctgccccctagcagagatgagctgaccaagaaccaggtgtccctgacctgcctggtgaagggcttctaccccagcgacatcgccgtggagtgggagagcaacggccagcccgagaacaactacaagaccaccccccctgtgctggacagcgatggcagcttcttcctgtacagcaagctgaccgtggacaagagcagatggcagcagggcaacgtgttcagctgcagcgtgatgcacgaggccctgcacaatcactacacccagaagagcctgagcctgtcccctggcaagtga

SEQ ID NO: 545 - DNA, 1026 bp, Artificial Sequence
  Synthetic
gacatccagatgacccagagccccagcagcctgagcgcctctgtgggcgatagagtgaccatcacctgcagagccagccaggccatcgacagctacctgcactggtatcagcagaagcctggcaaggcccctaagctgctgatctacagcgccagcaatctggagaccggcgtgcctagcagattcagcggcagcggctccggcaccgacttcaccctgaccatcagcagcctgctgcctgaggatttcgcccagtactactgccagcaggtggtgtggagacctttcaccttcggccagggcaccaaggtggagatcaagcgggtggagcccaagagcagcgataagacccacacctgccccccctgccctgcccccgagctgctgggcggacccagcgtgttcctgttcccccccaagcctaaggacaccctgatgatcagcagaacccccgaggtgacctgcgtggtggtggatgtgagccacgaggaccctgaggtgaagttcaactggtacgtggacggcgtggaggtgcacaatgccaagaccaagcccagggaggagcagtacaacagcacctaccgggtggtgtccgtgctgaccgtgctgcaccaggattggctgaacggcaaggagtacaagtgcaaggtgtccaacaaggccctgcctgcccctatcgagaaaaccatcagcaaggccaagggccagcccagagagccccaggtgtacaccctgccccctagcagagatgagctgaccaagaaccaggtgtccctgacctgcctggtgaagggcttctaccccagcgacatcgccgtggagtgggagagcaacggccagcccgagaacaactacaagaccaccccccctgtgctggacagcgatggcagcttcttcctgtacagcaagctgaccgtggacaagagcagatggcagcagggcaacgtgttcagctgcagcgtgatgcacgaggccctgcacaatcactacacccagaagagcctgagcctgtcccctggcaagtga

SEQ ID NO: 546 - DNA, 1026 bp, Artificial Sequence
  Synthetic
gacatccagatgacccagagccccagcagcctgagcgcctctgtgggcgatagagtgaccatcacctgcagagccagccaggccatcgacagctacctgcactggtatcagcagaagcctggcaaggcccctaagctgctgatctacagcgccagcaatctggagaccggcgtgcctagcagattcagcggcagcggctccggcaccgacttcaccctgaccatcagcagcctgctgcctgaggatttcgcccactactactgccagcaggtggtgtggagacctttcaccttcggccagggcaccaaggtggagatcaagcgggtggagcccaagagcagcgataagacccacacctgccccccctgccctgcccccgagctgctgggcggacccagcgtgttcctgttcccccccaagcctaaggacaccctgatgatcagcagaacccccgaggtgacctgcgtggtggtggatgtgagccacgaggaccctgaggtgaagttcaactggtacgtggacggcgtggaggtgcacaatgccaagaccaagcccagggaggagcagtacaacagcacctaccgggtggtgtccgtgctgaccgtgctgcaccaggattggctgaacggcaaggagtacaagtgcaaggtgtccaacaaggccctgcctgcccctatcgagaaaaccatcagcaaggccaagggccagcccagagagccccaggtgtacaccctgccccctagcagagatgagctgaccaagaaccaggtgtccctgacctgcctggtgaagggcttctaccccagcgacatcgccgtggagtgggagagcaacggccagcccgagaacaactacaagaccaccccccctgtgctggacagcgatggcagcttcttcctgtacagcaagctgaccgtggacaagagcagatggcagcagggcaacgtgttcagctgcagcgtgatgcacgaggccctgcacaatcactacacccagaagagcctgagcctgtcccctggcaagtga

SEQ ID NO: 547 - DNA, 1026 bp, Artificial Sequence
  Synthetic
gacatccagatgacccagagccccagcagcctgagcgcctctgtgggcgatagagtgaccatcacctgcagagccagccaggccatcgacagctacctgcactggtatcagcagaagcctggcaaggcccctaagctgctgatctacagcgccagcaatctggagaccggcgtgcctagcagattcagcggcagcggctccggcaccgacttcaccctgaccatcagcagcctgctgcctgaggatttcgccccctactactgccagcaggtggtgtggagacctttcaccttcggccagggcaccaaggtggagatcaagcgggtggagcccaagagcagcgataagacccacacctgccccccctgccctgcccccgagctgctgggcggacccagcgtgttcctgttcccccccaagcctaaggacaccctgatgatcagcagaacccccgaggtgacctgcgtggtggtggatgtgagccacgaggaccctgaggtgaagttcaactggtacgtggacggcgtggaggtgcacaatgccaagaccaagcccagggaggagcagtacaacagcacctaccgggtggtgtccgtgctgaccgtgctgcaccaggattggctgaacggcaaggagtacaagtgcaaggtgtccaacaaggccctgcctgcccctatcgagaaaaccatcagcaaggccaagggccagcccagagagccccaggtgtacaccctgccccctagcagagatgagctgaccaagaaccaggtgtccctgacctgcctggtgaagggcttctaccccagcgacatcgccgtggagtgggagagcaacggccagcccgagaacaactacaagaccaccccccctgtgctggacagcgatggcagcttcttcctgtacagcaagctgaccgtggacaagagcagatggcagcagggcaacgtgttcagctgcagcgtgatgcacgaggccctgcacaatcactacacccagaagagcctgagcctgtcccctggcaagtga

SEQ ID NO: 548 - DNA, 1026 bp, Artificial Sequence
  Synthetic
gacatccagatgacccagagccccagcagcctgagcgcctctgtgggcgatagagtgaccatcacctgcagagccagccaggccatcgacagctacctgcactggtatcagcagaagcctggcaaggcccctaagctgctgatctacagcgccagcaatctggagaccggcgtgcctagcagattcagcggcagcggctccggcaccgacttcaccctgaccatcagcagcctgctgcctgaggatttcgccaagtactactgccagcaggtggtgtggagacctttcaccttcggccagggcaccaaggtggagatcaagcgggtggagcccaagagcagcgataagacccacacctgccccccctgccctgcccccgagctgctgggcggacccagcgtgttcctgttcccccccaagcctaaggacaccctgatgatcagcagaacccccgaggtgacctgcgtggtggtggatgtgagccacgaggaccctgaggtgaagttcaactggtacgtggacggcgtggaggtgcacaatgccaagaccaagcccagggaggagcagtacaacagcacctaccgggtggtgtccgtgctgaccgtgctgcaccaggattggctgaacggcaaggagtacaagtgcaaggtgtccaacaaggccctgcctgcccctatcgagaaaaccatcagcaaggccaagggccagcccagagagccccaggtgtacaccctgccccctagcagagatgagctgaccaagaaccaggtgtccctgacctgcctggtgaagggcttctaccccagcgacatcgccgtggagtgggagagcaacggccagcccgagaacaactacaagaccaccccccctgtgctggacagcgatggcagcttcttcctgtacagcaagctgaccgtggacaagagcagatggcagcagggcaacgtgttcagctgcagcgtgatgcacgaggccctgcacaatcactacacccagaagagcctgagcctgtcccctggcaagtga

SEQ ID NO: 549 - DNA, 1026 bp, Artificial Sequence
  Synthetic
gacatccagatgacccagagccccagcagcctgagcgcctctgtgggcgatagagtgaccatcacctgcagagccagccaggccatcgacagctacctgcactggtatcagcagaagcctggcaaggcccctaagctgctgatctacagcgccagcaatctggagaccggcgtgcctagcagattcagcggcagcggctccggcaccgacttcaccctgaccatcagcagcctgctgcctgaggatttcgccaccagctactgccagcaggtggtgtggagacctttcaccttcggccagggcaccaaggtggagatcaagcgggtggagcccaagagcagcgataagacccacacctgccccccctgccctgcccccgagctgctgggcggacccagcgtgttcctgttcccccccaagcctaaggacaccctgatgatcagcagaacccccgaggtgacctgcgtggtggtggatgtgagccacgaggaccctgaggtgaagttcaactggtacgtggacggcgtggaggtgcacaatgccaagaccaagcccagggaggagcagtacaacagcacctaccgggtggtgtccgtgctgaccgtgctgcaccaggattggctgaacggcaaggagtacaagtgcaaggtgtccaacaaggccctgcctgcccctatcgagaaaaccatcagcaaggccaagggccagcccagagagccccaggtgtacaccctgccccctagcagagatgagctgaccaagaaccaggtgtccctgacctgcctggtgaagggcttctaccccagcgacatcgccgtggagtgggagagcaacggccagcccgagaacaactacaagaccaccccccctgtgctggacagcgatggcagcttcttcctgtacagcaagctgaccgtggacaagagcagatggcagcagggcaacgtgttcagctgcagcgtgatgcacgaggccctgcacaatcactacacccagaagagcctgagcctgtcccctggcaagtga

SEQ ID NO: 550 - DNA, 1026 bp, Artificial Sequence
  Synthetic
gacatccagatgacccagagccccagcagcctgagcgcctctgtgggcgatagagtgaccatcacctgcagagccagccaggccatcgacagctacctgcactggtatcagcagaagcctggcaaggcccctaagctgctgatctacagcgccagcaatctggagaccggcgtgcctagcagattcagcggcagcggctccggcaccgacttcaccctgaccatcagcagcctgctgcctgaggatttcgccaccctgtactgccagcaggtggtgtggagacctttcaccttcggccagggcaccaaggtggagatcaagcgggtggagcccaagagcagcgataagacccacacctgccccccctgccctgcccccgagctgctgggcggacccagcgtgttcctgttcccccccaagcctaaggacaccctgatgatcagcagaacccccgaggtgacctgcgtggtggtggatgtgagccacgaggaccctgaggtgaagttcaactggtacgtggacggcgtggaggtgcacaatgccaagaccaagcccagggaggagcagtacaacagcacctaccgggtggtgtccgtgctgaccgtgctgcaccaggattggctgaacggcaaggagtacaagtgcaaggtgtccaacaaggccctgcctgcccctatcgagaaaaccatcagcaaggccaagggccagcccagagagccccaggtgtacaccctgccccctagcagagatgagctgaccaagaaccaggtgtccctgacctgcctggtgaagggcttctaccccagcgacatcgccgtggagtgggagagcaacggccagcccgagaacaactacaagaccaccccccctgtgctggacagcgatggcagcttcttcctgtacagcaagctgaccgtggacaagagcagatggcagcagggcaacgtgttcagctgcagcgtgatgcacgaggccctgcacaatcactacacccagaagagcctgagcctgtcccctggcaagtga

SEQ ID NO: 551 - DNA, 1026 bp, Artificial Sequence
  Synthetic
gacatccagatgacccagagccccagcagcctgagcgcctctgtgggcgatagagtgaccatcacctgcagagccagccaggccatcgacagctacctgcactggtatcagcagaagcctggcaaggcccctaagctgctgatctacagcgccagcaatctggagaccggcgtgcctagcagattcagcggcagcggctccggcaccgacttcaccctgaccatcagcagcctgctgcctgaggatttcgccaccgactactgccagcaggtggtgtggagacctttcaccttcggccagggcaccaaggtggagatcaagcgggtggagcccaagagcagcgataagacccacacctgccccccctgccctgcccccgagctgctgggcggacccagcgtgttcctgttcccccccaagcctaaggacaccctgatgatcagcagaacccccgaggtgacctgcgtggtggtggatgtgagccacgaggaccctgaggtgaagttcaactggtacgtggacggcgtggaggtgcacaatgccaagaccaagcccagggaggagcagtacaacagcacctaccgggtggtgtccgtgctgaccgtgctgcaccaggattggctgaacggcaaggagtacaagtgcaaggtgtccaacaaggccctgcctgcccctatcgagaaaaccatcagcaaggccaagggccagcccagagagccccaggtgtacaccctgccccctagcagagatgagctgaccaagaaccaggtgtccctgacctgcctggtgaagggcttctaccccagcgacatcgccgtggagtgggagagcaacggccagcccgagaacaactacaagaccaccccccctgtgctggacagcgatggcagcttcttcctgtacagcaagctgaccgtggacaagagcagatggcagcagggcaacgtgttcagctgcagcgtgatgcacgaggccctgcacaatcactacacccagaagagcctgagcctgtcccctggcaagtga

SEQ ID NO: 552 - DNA, 1026 bp, Artificial Sequence
  Synthetic
gacatccagatgacccagagccccagcagcctgagcgcctctgtgggcgatagagtgaccatcacctgcagagccagccaggccatcgacagctacctgcactggtatcagcagaagcctggcaaggcccctaagctgctgatctacagcgccagcaatctggagaccggcgtgcctagcagattcagcggcagcggctccggcaccgacttcaccctgaccatcagcagcctgctgcctgaggatttcgccacccagtactgccagcaggtggtgtggagacctttcaccttcggccagggcaccaaggtggagatcaagcgggtggagcccaagagcagcgataagacccacacctgccccccctgccctgcccccgagctgctgggcggacccagcgtgttcctgttcccccccaagcctaaggacaccctgatgatcagcagaacccccgaggtgacctgcgtggtggtggatgtgagccacgaggaccctgaggtgaagttcaactggtacgtggacggcgtggaggtgcacaatgccaagaccaagcccagggaggagcagtacaacagcacctaccgggtggtgtccgtgctgaccgtgctgcaccaggattggctgaacggcaaggagtacaagtgcaaggtgtccaacaaggccctgcctgcccctatcgagaaaaccatcagcaaggccaagggccagcccagagagccccaggtgtacaccctgccccctagcagagatgagctgaccaagaaccaggtgtccctgacctgcctggtgaagggcttctaccccagcgacatcgccgtggagtgggagagcaacggccagcccgagaacaactacaagaccaccccccctgtgctggacagcgatggcagcttcttcctgtacagcaagctgaccgtggacaagagcagatggcagcagggcaacgtgttcagctgcagcgtgatgcacgaggccctgcacaatcactacacccagaagagcctgagcctgtcccctggcaagtga

SEQ ID NO: 553 - DNA, 1026 bp, Artificial Sequence
  Synthetic
gacatccagatgacccagagccccagcagcctgagcgcctctgtgggcgatagagtgaccatcacctgcagagccagccaggccatcgacagctacctgcactggtatcagcagaagcctggcaaggcccctaagctgctgatctacagcgccagcaatctggagaccggcgtgcctagcagattcagcggcagcggctccggcaccgacttcaccctgaccatcagcagcctgctgcctgaggatttcgccacccactactgccagcaggtggtgtggagacctttcaccttcggccagggcaccaaggtggagatcaagcgggtggagcccaagagcagcgataagacccacacctgccccccctgccctgcccccgagctgctgggcggacccagcgtgttcctgttcccccccaagcctaaggacaccctgatgatcagcagaacccccgaggtgacctgcgtggtggtggatgtgagccacgaggaccctgaggtgaagttcaactggtacgtggacggcgtggaggtgcacaatgccaagaccaagcccagggaggagcagtacaacagcacctaccgggtggtgtccgtgctgaccgtgctgcaccaggattggctgaacggcaaggagtacaagtgcaaggtgtccaacaaggccctgcctgcccctatcgagaaaaccatcagcaaggccaagggccagcccagagagccccaggtgtacaccctgccccctagcagagatgagctgaccaagaaccaggtgtccctgacctgcctggtgaagggcttctaccccagcgacatcgccgtggagtgggagagcaacggccagcccgagaacaactacaagaccaccccccctgtgctggacagcgatggcagcttcttcctgtacagcaagctgaccgtggacaagagcagatggcagcagggcaacgtgttcagctgcagcgtgatgcacgaggccctgcacaatcactacacccagaagagcctgagcctgtcccctggcaagtga

SEQ ID NO: 554 - DNA, 1026 bp, Artificial Sequence
  Synthetic
gacatccagatgacccagagccccagcagcctgagcgcctctgtgggcgatagagtgaccatcacctgcagagccagccaggccatcgacagctacctgcactggtatcagcagaagcctggcaaggcccctaagctgctgatctacagcgccagcaatctggagaccggcgtgcctagcagattcagcggcagcggctccggcaccgacttcaccctgaccatcagcagcctgctgcctgaggatttcgccaccccctactgccagcaggtggtgtggagacctttcaccttcggccagggcaccaaggtggagatcaagcgggtggagcccaagagcagcgataagacccacacctgccccccctgccctgcccccgagctgctgggcggacccagcgtgttcctgttcccccccaagcctaaggacaccctgatgatcagcagaacccccgaggtgacctgcgtggtggtggatgtgagccacgaggaccctgaggtgaagttcaactggtacgtggacggcgtggaggtgcacaatgccaagaccaagcccagggaggagcagtacaacagcacctaccgggtggtgtccgtgctgaccgtgctgcaccaggattggctgaacggcaaggagtacaagtgcaaggtgtccaacaaggccctgcctgcccctatcgagaaaaccatcagcaaggccaagggccagcccagagagccccaggtgtacaccctgccccctagcagagatgagctgaccaagaaccaggtgtccctgacctgcctggtgaagggcttctaccccagcgacatcgccgtggagtgggagagcaacggccagcccgagaacaactacaagaccaccccccctgtgctggacagcgatggcagcttcttcctgtacagcaagctgaccgtggacaagagcagatggcagcagggcaacgtgttcagctgcagcgtgatgcacgaggccctgcacaatcactacacccagaagagcctgagcctgtcccctggcaagtga

SEQ ID NO: 555 - DNA, 1026 bp, Artificial Sequence
  Synthetic
gacatccagatgacccagagccccagcagcctgagcgcctctgtgggcgatagagtgaccatcacctgcagagccagccaggccatcgacagctacctgcactggtatcagcagaagcctggcaaggcccctaagctgctgatctacagcgccagcaatctggagaccggcgtgcctagcagattcagcggcagcggctccggcaccgacttcaccctgaccatcagcagcctgctgcctgaggatttcgccaccaagtactgccagcaggtggtgtggagacctttcaccttcggccagggcaccaaggtggagatcaagcgggtggagcccaagagcagcgataagacccacacctgccccccctgccctgcccccgagctgctgggcggacccagcgtgttcctgttcccccccaagcctaaggacaccctgatgatcagcagaacccccgaggtgacctgcgtggtggtggatgtgagccacgaggaccctgaggtgaagttcaactggtacgtggacggcgtggaggtgcacaatgccaagaccaagcccagggaggagcagtacaacagcacctaccgggtggtgtccgtgctgaccgtgctgcaccaggattggctgaacggcaaggagtacaagtgcaaggtgtccaacaaggccctgcctgcccctatcgagaaaaccatcagcaaggccaagggccagcccagagagccccaggtgtacaccctgccccctagcagagatgagctgaccaagaaccaggtgtccctgacctgcctggtgaagggcttctaccccagcgacatcgccgtggagtgggagagcaacggccagcccgagaacaactacaagaccaccccccctgtgctggacagcgatggcagcttcttcctgtacagcaagctgaccgtggacaagagcagatggcagcagggcaacgtgttcagctgcagcgtgatgcacgaggccctgcacaatcactacacccagaagagcctgagcctgtcccctggcaagtga

SEQ ID NO: 556 - DNA, 1026 bp, Artificial Sequence
  Synthetic
gacatccagatgacccagagccccagcagcctgagcgcctctgtgggcgatagagtgaccatcacctgcagagccagccaggccatcgacagctacctgcactggtatcagcagaagcctggcaaggcccctaagctgctgatctacagcgccagcaatctggagaccggcgtgcctagcagattcagcggcagcggctccggcaccgacttcaccctgaccatcagcagcctgctgcctgaggatttcgccacctacagctgccagcaggtggtgtggagacctttcaccttcggccagggcaccaaggtggagatcaagcgggtggagcccaagagcagcgataagacccacacctgccccccctgccctgcccccgagctgctgggcggacccagcgtgttcctgttcccccccaagcctaaggacaccctgatgatcagcagaacccccgaggtgacctgcgtggtggtggatgtgagccacgaggaccctgaggtgaagttcaactggtacgtggacggcgtggaggtgcacaatgccaagaccaagcccagggaggagcagtacaacagcacctaccgggtggtgtccgtgctgaccgtgctgcaccaggattggctgaacggcaaggagtacaagtgcaaggtgtccaacaaggccctgcctgcccctatcgagaaaaccatcagcaaggccaagggccagcccagagagccccaggtgtacaccctgccccctagcagagatgagctgaccaagaaccaggtgtccctgacctgcctggtgaagggcttctaccccagcgacatcgccgtggagtgggagagcaacggccagcccgagaacaactacaagaccaccccccctgtgctggacagcgatggcagcttcttcctgtacagcaagctgaccgtggacaagagcagatggcagcagggcaacgtgttcagctgcagcgtgatgcacgaggccctgcacaatcactacacccagaagagcctgagcctgtcccctggcaagtga

SEQ ID NO: 557 - DNA, 1026 bp, Artificial Sequence
  Synthetic
gacatccagatgacccagagccccagcagcctgagcgcctctgtgggcgatagagtgaccatcacctgcagagccagccaggccatcgacagctacctgcactggtatcagcagaagcctggcaaggcccctaagctgctgatctacagcgccagcaatctggagaccggcgtgcctagcagattcagcggcagcggctccggcaccgacttcaccctgaccatcagcagcctgctgcctgaggatttcgccacctacctgtgccagcaggtggtgtggagacctttcaccttcggccagggcaccaaggtggagatcaagcgggtggagcccaagagcagcgataagacccacacctgccccccctgccctgcccccgagctgctgggcggacccagcgtgttcctgttcccccccaagcctaaggacaccctgatgatcagcagaacccccgaggtgacctgcgtggtggtggatgtgagccacgaggaccctgaggtgaagttcaactggtacgtggacggcgtggaggtgcacaatgccaagaccaagcccagggaggagcagtacaacagcacctaccgggtggtgtccgtgctgaccgtgctgcaccaggattggctgaacggcaaggagtacaagtgcaaggtgtccaacaaggccctgcctgcccctatcgagaaaaccatcagcaaggccaagggccagcccagagagccccaggtgtacaccctgccccctagcagagatgagctgaccaagaaccaggtgtccctgacctgcctggtgaagggcttctaccccagcgacatcgccgtggagtgggagagcaacggccagcccgagaacaactacaagaccaccccccctgtgctggacagcgatggcagcttcttcctgtacagcaagctgaccgtggacaagagcagatggcagcagggcaacgtgttcagctgcagcgtgatgcacgaggccctgcacaatcactacacccagaagagcctgagcctgtcccctggcaagtga

SEQ ID NO: 558 - DNA, 1026 bp, Artificial Sequence
  Synthetic
gacatccagatgacccagagccccagcagcctgagcgcctctgtgggcgatagagtgaccatcacctgcagagccagccaggccatcgacagctacctgcactggtatcagcagaagcctggcaaggcccctaagctgctgatctacagcgccagcaatctggagaccggcgtgcctagcagattcagcggcagcggctccggcaccgacttcaccctgaccatcagcagcctgctgcctgaggatttcgccacctacgactgccagcaggtggtgtggagacctttcaccttcggccagggcaccaaggtggagatcaagcgggtggagcccaagagcagcgataagacccacacctgccccccctgccctgcccccgagctgctgggcggacccagcgtgttcctgttcccccccaagcctaaggacaccctgatgatcagcagaacccccgaggtgacctgcgtggtggtggatgtgagccacgaggaccctgaggtgaagttcaactggtacgtggacggcgtggaggtgcacaatgccaagaccaagcccagggaggagcagtacaacagcacctaccgggtggtgtccgtgctgaccgtgctgcaccaggattggctgaacggcaaggagtacaagtgcaaggtgtccaacaaggccctgcctgcccctatcgagaaaaccatcagcaaggccaagggccagcccagagagccccaggtgtacaccctgccccctagcagagatgagctgaccaagaaccaggtgtccctgacctgcctggtgaagggcttctaccccagcgacatcgccgtggagtgggagagcaacggccagcccgagaacaactacaagaccaccccccctgtgctggacagcgatggcagcttcttcctgtacagcaagctgaccgtggacaagagcagatggcagcagggcaacgtgttcagctgcagcgtgatgcacgaggccctgcacaatcactacacccagaagagcctgagcctgtcccctggcaagtga

SEQ ID NO: 559 - DNA, 1026 bp, Artificial Sequence
  Synthetic
gacatccagatgacccagagccccagcagcctgagcgcctctgtgggcgatagagtgaccatcacctgcagagccagccaggccatcgacagctacctgcactggtatcagcagaagcctggcaaggcccctaagctgctgatctacagcgccagcaatctggagaccggcgtgcctagcagattcagcggcagcggctccggcaccgacttcaccctgaccatcagcagcctgctgcctgaggatttcgccacctaccagtgccagcaggtggtgtggagacctttcaccttcggccagggcaccaaggtggagatcaagcgggtggagcccaagagcagcgataagacccacacctgccccccctgccctgcccccgagctgctgggcggacccagcgtgttcctgttcccccccaagcctaaggacaccctgatgatcagcagaacccccgaggtgacctgcgtggtggtggatgtgagccacgaggaccctgaggtgaagttcaactggtacgtggacggcgtggaggtgcacaatgccaagaccaagcccagggaggagcagtacaacagcacctaccgggtggtgtccgtgctgaccgtgctgcaccaggattggctgaacggcaaggagtacaagtgcaaggtgtccaacaaggccctgcctgcccctatcgagaaaaccatcagcaaggccaagggccagcccagagagccccaggtgtacaccctgccccctagcagagatgagctgaccaagaaccaggtgtccctgacctgcctggtgaagggcttctaccccagcgacatcgccgtggagtgggagagcaacggccagcccgagaacaactacaagaccaccccccctgtgctggacagcgatggcagcttcttcctgtacagcaagctgaccgtggacaagagcagatggcagcagggcaacgtgttcagctgcagcgtgatgcacgaggccctgcacaatcactacacccagaagagcctgagcctgtcccctggcaagtga

SEQ ID NO: 560 - DNA, 1026 bp, Artificial Sequence
  Synthetic
gacatccagatgacccagagccccagcagcctgagcgcctctgtgggcgatagagtgaccatcacctgcagagccagccaggccatcgacagctacctgcactggtatcagcagaagcctggcaaggcccctaagctgctgatctacagcgccagcaatctggagaccggcgtgcctagcagattcagcggcagcggctccggcaccgacttcaccctgaccatcagcagcctgctgcctgaggatttcgccacctaccactgccagcaggtggtgtggagacctttcaccttcggccagggcaccaaggtggagatcaagcgggtggagcccaagagcagcgataagacccacacctgccccccctgccctgcccccgagctgctgggcggacccagcgtgttcctgttcccccccaagcctaaggacaccctgatgatcagcagaacccccgaggtgacctgcgtggtggtggatgtgagccacgaggaccctgaggtgaagttcaactggtacgtggacggcgtggaggtgcacaatgccaagaccaagcccagggaggagcagtacaacagcacctaccgggtggtgtccgtgctgaccgtgctgcaccaggattggctgaacggcaaggagtacaagtgcaaggtgtccaacaaggccctgcctgcccctatcgagaaaaccatcagcaaggccaagggccagcccagagagccccaggtgtacaccctgccccctagcagagatgagctgaccaagaaccaggtgtccctgacctgcctggtgaagggcttctaccccagcgacatcgccgtggagtgggagagcaacggccagcccgagaacaactacaagaccaccccccctgtgctggacagcgatggcagcttcttcctgtacagcaagctgaccgtggacaagagcagatggcagcagggcaacgtgttcagctgcagcgtgatgcacgaggccctgcacaatcactacacccagaagagcctgagcctgtcccctggcaagtga

SEQ ID NO: 561 - DNA, 1026 bp, Artificial Sequence
  Synthetic
gacatccagatgacccagagccccagcagcctgagcgcctctgtgggcgatagagtgaccatcacctgcagagccagccaggccatcgacagctacctgcactggtatcagcagaagcctggcaaggcccctaagctgctgatctacagcgccagcaatctggagaccggcgtgcctagcagattcagcggcagcggctccggcaccgacttcaccctgaccatcagcagcctgctgcctgaggatttcgccacctacccctgccagcaggtggtgtggagacctttcaccttcggccagggcaccaaggtggagatcaagcgggtggagcccaagagcagcgataagacccacacctgccccccctgccctgcccccgagctgctgggcggacccagcgtgttcctgttcccccccaagcctaaggacaccctgatgatcagcagaacccccgaggtgacctgcgtggtggtggatgtgagccacgaggaccctgaggtgaagttcaactggtacgtggacggcgtggaggtgcacaatgccaagaccaagcccagggaggagcagtacaacagcacctaccgggtggtgtccgtgctgaccgtgctgcaccaggattggctgaacggcaaggagtacaagtgcaaggtgtccaacaaggccctgcctgcccctatcgagaaaaccatcagcaaggccaagggccagcccagagagccccaggtgtacaccctgccccctagcagagatgagctgaccaagaaccaggtgtccctgacctgcctggtgaagggcttctaccccagcgacatcgccgtggagtgggagagcaacggccagcccgagaacaactacaagaccaccccccctgtgctggacagcgatggcagcttcttcctgtacagcaagctgaccgtggacaagagcagatggcagcagggcaacgtgttcagctgcagcgtgatgcacgaggccctgcacaatcactacacccagaagagcctgagcctgtcccctggcaagtga

SEQ ID NO: 562 - DNA, 1026 bp, Artificial Sequence
  Synthetic
gacatccagatgacccagagccccagcagcctgagcgcctctgtgggcgatagagtgaccatcacctgcagagccagccaggccatcgacagctacctgcactggtatcagcagaagcctggcaaggcccctaagctgctgatctacagcgccagcaatctggagaccggcgtgcctagcagattcagcggcagcggctccggcaccgacttcaccctgaccatcagcagcctgctgcctgaggatttcgccacctacaagtgccagcaggtggtgtggagacctttcaccttcggccagggcaccaaggtggagatcaagcgggtggagcccaagagcagcgataagacccacacctgccccccctgccctgcccccgagctgctgggcggacccagcgtgttcctgttcccccccaagcctaaggacaccctgatgatcagcagaacccccgaggtgacctgcgtggtggtggatgtgagccacgaggaccctgaggtgaagttcaactggtacgtggacggcgtggaggtgcacaatgccaagaccaagcccagggaggagcagtacaacagcacctaccgggtggtgtccgtgctgaccgtgctgcaccaggattggctgaacggcaaggagtacaagtgcaaggtgtccaacaaggccctgcctgcccctatcgagaaaaccatcagcaaggccaagggccagcccagagagccccaggtgtacaccctgccccctagcagagatgagctgaccaagaaccaggtgtccctgacctgcctggtgaagggcttctaccccagcgacatcgccgtggagtgggagagcaacggccagcccgagaacaactacaagaccaccccccctgtgctggacagcgatggcagcttcttcctgtacagcaagctgaccgtggacaagagcagatggcagcagggcaacgtgttcagctgcagcgtgatgcacgaggccctgcacaatcactacacccagaagagcctgagcctgtcccctggcaagtga

SEQ ID NO: 563 - DNA, 1026 bp, Artificial Sequence
  Synthetic
gacatccagatgacccagagccccagcagcctgagcgcctctgtgggcgatagagtgaccatcacctgcagagccagccaggccatcgacagctacctgcactggtatcagcagaagcctggcaaggcccctaagctgctgatctacagcgccagcaatctggagaccggcgtgcctagcagattcagcggcagcggctccggcaccgacttcaccctgaccatcagcagcctgctgcctgaggatttcgccacctactactgccagcaggtggtgtggagacctttcaccagcggccagggcaccaaggtggagatcaagcgggtggagcccaagagcagcgataagacccacacctgccccccctgccctgcccccgagctgctgggcggacccagcgtgttcctgttcccccccaagcctaaggacaccctgatgatcagcagaacccccgaggtgacctgcgtggtggtggatgtgagccacgaggaccctgaggtgaagttcaactggtacgtggacggcgtggaggtgcacaatgccaagaccaagcccagggaggagcagtacaacagcacctaccgggtggtgtccgtgctgaccgtgctgcaccaggattggctgaacggcaaggagtacaagtgcaaggtgtccaacaaggccctgcctgcccctatcgagaaaaccatcagcaaggccaagggccagcccagagagccccaggtgtacaccctgccccctagcagagatgagctgaccaagaaccaggtgtccctgacctgcctggtgaagggcttctaccccagcgacatcgccgtggagtgggagagcaacggccagcccgagaacaactacaagaccaccccccctgtgctggacagcgatggcagcttcttcctgtacagcaagctgaccgtggacaagagcagatggcagcagggcaacgtgttcagctgcagcgtgatgcacgaggccctgcacaatcactacacccagaagagcctgagcctgtcccctggcaagtga

SEQ ID NO: 564 - DNA, 1026 bp, Artificial Sequence
  Synthetic
gacatccagatgacccagagccccagcagcctgagcgcctctgtgggcgatagagtgaccatcacctgcagagccagccaggccatcgacagctacctgcactggtatcagcagaagcctggcaaggcccctaagctgctgatctacagcgccagcaatctggagaccggcgtgcctagcagattcagcggcagcggctccggcaccgacttcaccctgaccatcagcagcctgctgcctgaggatttcgccacctactactgccagcaggtggtgtggagacctttcaccctgggccagggcaccaaggtggagatcaagcgggtggagcccaagagcagcgataagacccacacctgccccccctgccctgcccccgagctgctgggcggacccagcgtgttcctgttcccccccaagcctaaggacaccctgatgatcagcagaacccccgaggtgacctgcgtggtggtggatgtgagccacgaggaccctgaggtgaagttcaactggtacgtggacggcgtggaggtgcacaatgccaagaccaagcccagggaggagcagtacaacagcacctaccgggtggtgtccgtgctgaccgtgctgcaccaggattggctgaacggcaaggagtacaagtgcaaggtgtccaacaaggccctgcctgcccctatcgagaaaaccatcagcaaggccaagggccagcccagagagccccaggtgtacaccctgccccctagcagagatgagctgaccaagaaccaggtgtccctgacctgcctggtgaagggcttctaccccagcgacatcgccgtggagtgggagagcaacggccagcccgagaacaactacaagaccaccccccctgtgctggacagcgatggcagcttcttcctgtacagcaagctgaccgtggacaagagcagatggcagcagggcaacgtgttcagctgcagcgtgatgcacgaggccctgcacaatcactacacccagaagagcctgagcctgtcccctggcaagtga

SEQ ID NO: 565 - DNA, 1026 bp, Artificial Sequence
  Synthetic
gacatccagatgacccagagccccagcagcctgagcgcctctgtgggcgatagagtgaccatcacctgcagagccagccaggccatcgacagctacctgcactggtatcagcagaagcctggcaaggcccctaagctgctgatctacagcgccagcaatctggagaccggcgtgcctagcagattcagcggcagcggctccggcaccgacttcaccctgaccatcagcagcctgctgcctgaggatttcgccacctactactgccagcaggtggtgtggagacctttcacctacggccagggcaccaaggtggagatcaagcgggtggagcccaagagcagcgataagacccacacctgccccccctgccctgcccccgagctgctgggcggacccagcgtgttcctgttcccccccaagcctaaggacaccctgatgatcagcagaacccccgaggtgacctgcgtggtggtggatgtgagccacgaggaccctgaggtgaagttcaactggtacgtggacggcgtggaggtgcacaatgccaagaccaagcccagggaggagcagtacaacagcacctaccgggtggtgtccgtgctgaccgtgctgcaccaggattggctgaacggcaaggagtacaagtgcaaggtgtccaacaaggccctgcctgcccctatcgagaaaaccatcagcaaggccaagggccagcccagagagccccaggtgtacaccctgccccctagcagagatgagctgaccaagaaccaggtgtccctgacctgcctggtgaagggcttctaccccagcgacatcgccgtggagtgggagagcaacggccagcccgagaacaactacaagaccaccccccctgtgctggacagcgatggcagcttcttcctgtacagcaagctgaccgtggacaagagcagatggcagcagggcaacgtgttcagctgcagcgtgatgcacgaggccctgcacaatcactacacccagaagagcctgagcctgtcccctggcaagtga

SEQ ID NO: 566 - DNA, 1026 bp, Artificial Sequence
  Synthetic
gacatccagatgacccagagccccagcagcctgagcgcctctgtgggcgatagagtgaccatcacctgcagagccagccaggccatcgacagctacctgcactggtatcagcagaagcctggcaaggcccctaagctgctgatctacagcgccagcaatctggagaccggcgtgcctagcagattcagcggcagcggctccggcaccgacttcaccctgaccatcagcagcctgctgcctgaggatttcgccacctactactgccagcaggtggtgtggagacctttcaccgacggccagggcaccaaggtggagatcaagcgggtggagcccaagagcagcgataagacccacacctgccccccctgccctgcccccgagctgctgggcggacccagcgtgttcctgttcccccccaagcctaaggacaccctgatgatcagcagaacccccgaggtgacctgcgtggtggtggatgtgagccacgaggaccctgaggtgaagttcaactggtacgtggacggcgtggaggtgcacaatgccaagaccaagcccagggaggagcagtacaacagcacctaccgggtggtgtccgtgctgaccgtgctgcaccaggattggctgaacggcaaggagtacaagtgcaaggtgtccaacaaggccctgcctgcccctatcgagaaaaccatcagcaaggccaagggccagcccagagagccccaggtgtacaccctgccccctagcagagatgagctgaccaagaaccaggtgtccctgacctgcctggtgaagggcttctaccccagcgacatcgccgtggagtgggagagcaacggccagcccgagaacaactacaagaccaccccccctgtgctggacagcgatggcagcttcttcctgtacagcaagctgaccgtggacaagagcagatggcagcagggcaacgtgttcagctgcagcgtgatgcacgaggccctgcacaatcactacacccagaagagcctgagcctgtcccctggcaagtga

SEQ ID NO: 567 - DNA, 1026 bp, Artificial Sequence
  Synthetic
gacatccagatgacccagagccccagcagcctgagcgcctctgtgggcgatagagtgaccatcacctgcagagccagccaggccatcgacagctacctgcactggtatcagcagaagcctggcaaggcccctaagctgctgatctacagcgccagcaatctggagaccggcgtgcctagcagattcagcggcagcggctccggcaccgacttcaccctgaccatcagcagcctgctgcctgaggatttcgccacctactactgccagcaggtggtgtggagacctttcacccagggccagggcaccaaggtggagatcaagcgggtggagcccaagagcagcgataagacccacacctgccccccctgccctgcccccgagctgctgggcggacccagcgtgttcctgttcccccccaagcctaaggacaccctgatgatcagcagaacccccgaggtgacctgcgtggtggtggatgtgagccacgaggaccctgaggtgaagttcaactggtacgtggacggcgtggaggtgcacaatgccaagaccaagcccagggaggagcagtacaacagcacctaccgggtggtgtccgtgctgaccgtgctgcaccaggattggctgaacggcaaggagtacaagtgcaaggtgtccaacaaggccctgcctgcccctatcgagaaaaccatcagcaaggccaagggccagcccagagagccccaggtgtacaccctgccccctagcagagatgagctgaccaagaaccaggtgtccctgacctgcctggtgaagggcttctaccccagcgacatcgccgtggagtgggagagcaacggccagcccgagaacaactacaagaccaccccccctgtgctggacagcgatggcagcttcttcctgtacagcaagctgaccgtggacaagagcagatggcagcagggcaacgtgttcagctgcagcgtgatgcacgaggccctgcacaatcactacacccagaagagcctgagcctgtcccctggcaagtga

SEQ ID NO: 568 - DNA, 1026 bp, Artificial Sequence
  Synthetic
gacatccagatgacccagagccccagcagcctgagcgcctctgtgggcgatagagtgaccatcacctgcagagccagccaggccatcgacagctacctgcactggtatcagcagaagcctggcaaggcccctaagctgctgatctacagcgccagcaatctggagaccggcgtgcctagcagattcagcggcagcggctccggcaccgacttcaccctgaccatcagcagcctgctgcctgaggatttcgccacctactactgccagcaggtggtgtggagacctttcacccacggccagggcaccaaggtggagatcaagcgggtggagcccaagagcagcgataagacccacacctgccccccctgccctgcccccgagctgctgggcggacccagcgtgttcctgttcccccccaagcctaaggacaccctgatgatcagcagaacccccgaggtgacctgcgtggtggtggatgtgagccacgaggaccctgaggtgaagttcaactggtacgtggacggcgtggaggtgcacaatgccaagaccaagcccagggaggagcagtacaacagcacctaccgggtggtgtccgtgctgaccgtgctgcaccaggattggctgaacggcaaggagtacaagtgcaaggtgtccaacaaggccctgcctgcccctatcgagaaaaccatcagcaaggccaagggccagcccagagagccccaggtgtacaccctgccccctagcagagatgagctgaccaagaaccaggtgtccctgacctgcctggtgaagggcttctaccccagcgacatcgccgtggagtgggagagcaacggccagcccgagaacaactacaagaccaccccccctgtgctggacagcgatggcagcttcttcctgtacagcaagctgaccgtggacaagagcagatggcagcagggcaacgtgttcagctgcagcgtgatgcacgaggccctgcacaatcactacacccagaagagcctgagcctgtcccctggcaagtga

SEQ ID NO: 569 - DNA, 1026 bp, Artificial Sequence
  Synthetic
gacatccagatgacccagagccccagcagcctgagcgcctctgtgggcgatagagtgaccatcacctgcagagccagccaggccatcgacagctacctgcactggtatcagcagaagcctggcaaggcccctaagctgctgatctacagcgccagcaatctggagaccggcgtgcctagcagattcagcggcagcggctccggcaccgacttcaccctgaccatcagcagcctgctgcctgaggatttcgccacctactactgccagcaggtggtgtggagacctttcacccccggccagggcaccaaggtggagatcaagcgggtggagcccaagagcagcgataagacccacacctgccccccctgccctgcccccgagctgctgggcggacccagcgtgttcctgttcccccccaagcctaaggacaccctgatgatcagcagaacccccgaggtgacctgcgtggtggtggatgtgagccacgaggaccctgaggtgaagttcaactggtacgtggacggcgtggaggtgcacaatgccaagaccaagcccagggaggagcagtacaacagcacctaccgggtggtgtccgtgctgaccgtgctgcaccaggattggctgaacggcaaggagtacaagtgcaaggtgtccaacaaggccctgcctgcccctatcgagaaaaccatcagcaaggccaagggccagcccagagagccccaggtgtacaccctgccccctagcagagatgagctgaccaagaaccaggtgtccctgacctgcctggtgaagggcttctaccccagcgacatcgccgtggagtgggagagcaacggccagcccgagaacaactacaagaccaccccccctgtgctggacagcgatggcagcttcttcctgtacagcaagctgaccgtggacaagagcagatggcagcagggcaacgtgttcagctgcagcgtgatgcacgaggccctgcacaatcactacacccagaagagcctgagcctgtcccctggcaagtga

SEQ ID NO: 570 - DNA, 1026 bp, Artificial Sequence
  Synthetic
gacatccagatgacccagagccccagcagcctgagcgcctctgtgggcgatagagtgaccatcacctgcagagccagccaggccatcgacagctacctgcactggtatcagcagaagcctggcaaggcccctaagctgctgatctacagcgccagcaatctggagaccggcgtgcctagcagattcagcggcagcggctccggcaccgacttcaccctgaccatcagcagcctgctgcctgaggatttcgccacctactactgccagcaggtggtgtggagacctttcaccaagggccagggcaccaaggtggagatcaagcgggtggagcccaagagcagcgataagacccacacctgccccccctgccctgcccccgagctgctgggcggacccagcgtgttcctgttcccccccaagcctaaggacaccctgatgatcagcagaacccccgaggtgacctgcgtggtggtggatgtgagccacgaggaccctgaggtgaagttcaactggtacgtggacggcgtggaggtgcacaatgccaagaccaagcccagggaggagcagtacaacagcacctaccgggtggtgtccgtgctgaccgtgctgcaccaggattggctgaacggcaaggagtacaagtgcaaggtgtccaacaaggccctgcctgcccctatcgagaaaaccatcagcaaggccaagggccagcccagagagccccaggtgtacaccctgccccctagcagagatgagctgaccaagaaccaggtgtccctgacctgcctggtgaagggcttctaccccagcgacatcgccgtggagtgggagagcaacggccagcccgagaacaactacaagaccaccccccctgtgctggacagcgatggcagcttcttcctgtacagcaagctgaccgtggacaagagcagatggcagcagggcaacgtgttcagctgcagcgtgatgcacgaggccctgcacaatcactacacccagaagagcctgagcctgtcccctggcaagtga

SEQ ID NO: 571 - DNA, 1026 bp, Artificial Sequence
  Synthetic
gacatccagatgacccagagccccagcagcctgagcgcctctgtgggcgatagagtgaccatcacctgcagagccagccaggccatcgacagctacctgcactggtatcagcagaagcctggcaaggcccctaagctgctgatctacagcgccagcaatctggagaccggcgtgcctagcagattcagcggcagcggctccggcaccgacttcaccctgaccatcagcagcctgctgcctgaggatttcgccacctactactgccagcaggtggtgtggagacctttcaccttcagccagggcaccaaggtggagatcaagcgggtggagcccaagagcagcgataagacccacacctgccccccctgccctgcccccgagctgctgggcggacccagcgtgttcctgttcccccccaagcctaaggacaccctgatgatcagcagaacccccgaggtgacctgcgtggtggtggatgtgagccacgaggaccctgaggtgaagttcaactggtacgtggacggcgtggaggtgcacaatgccaagaccaagcccagggaggagcagtacaacagcacctaccgggtggtgtccgtgctgaccgtgctgcaccaggattggctgaacggcaaggagtacaagtgcaaggtgtccaacaaggccctgcctgcccctatcgagaaaaccatcagcaaggccaagggccagcccagagagccccaggtgtacaccctgccccctagcagagatgagctgaccaagaaccaggtgtccctgacctgcctggtgaagggcttctaccccagcgacatcgccgtggagtgggagagcaacggccagcccgagaacaactacaagaccaccccccctgtgctggacagcgatggcagcttcttcctgtacagcaagctgaccgtggacaagagcagatggcagcagggcaacgtgttcagctgcagcgtgatgcacgaggccctgcacaatcactacacccagaagagcctgagcctgtcccctggcaagtga

SEQ ID NO: 572 - DNA, 1026 bp, Artificial Sequence
  Synthetic
gacatccagatgacccagagccccagcagcctgagcgcctctgtgggcgatagagtgaccatcacctgcagagccagccaggccatcgacagctacctgcactggtatcagcagaagcctggcaaggcccctaagctgctgatctacagcgccagcaatctggagaccggcgtgcctagcagattcagcggcagcggctccggcaccgacttcaccctgaccatcagcagcctgctgcctgaggatttcgccacctactactgccagcaggtggtgtggagacctttcaccttcctgcagggcaccaaggtggagatcaagcgggtggagcccaagagcagcgataagacccacacctgccccccctgccctgcccccgagctgctgggcggacccagcgtgttcctgttcccccccaagcctaaggacaccctgatgatcagcagaacccccgaggtgacctgcgtggtggtggatgtgagccacgaggaccctgaggtgaagttcaactggtacgtggacggcgtggaggtgcacaatgccaagaccaagcccagggaggagcagtacaacagcacctaccgggtggtgtccgtgctgaccgtgctgcaccaggattggctgaacggcaaggagtacaagtgcaaggtgtccaacaaggccctgcctgcccctatcgagaaaaccatcagcaaggccaagggccagcccagagagccccaggtgtacaccctgccccctagcagagatgagctgaccaagaaccaggtgtccctgacctgcctggtgaagggcttctaccccagcgacatcgccgtggagtgggagagcaacggccagcccgagaacaactacaagaccaccccccctgtgctggacagcgatggcagcttcttcctgtacagcaagctgaccgtggacaagagcagatggcagcagggcaacgtgttcagctgcagcgtgatgcacgaggccctgcacaatcactacacccagaagagcctgagcctgtcccctggcaagtga

SEQ ID NO: 573 - DNA, 1026 bp, Artificial Sequence
  Synthetic
gacatccagatgacccagagccccagcagcctgagcgcctctgtgggcgatagagtgaccatcacctgcagagccagccaggccatcgacagctacctgcactggtatcagcagaagcctggcaaggcccctaagctgctgatctacagcgccagcaatctggagaccggcgtgcctagcagattcagcggcagcggctccggcaccgacttcaccctgaccatcagcagcctgctgcctgaggatttcgccacctactactgccagcaggtggtgtggagacctttcaccttctaccagggcaccaaggtggagatcaagcgggtggagcccaagagcagcgataagacccacacctgccccccctgccctgcccccgagctgctgggcggacccagcgtgttcctgttcccccccaagcctaaggacaccctgatgatcagcagaacccccgaggtgacctgcgtggtggtggatgtgagccacgaggaccctgaggtgaagttcaactggtacgtggacggcgtggaggtgcacaatgccaagaccaagcccagggaggagcagtacaacagcacctaccgggtggtgtccgtgctgaccgtgctgcaccaggattggctgaacggcaaggagtacaagtgcaaggtgtccaacaaggccctgcctgcccctatcgagaaaaccatcagcaaggccaagggccagcccagagagccccaggtgtacaccctgccccctagcagagatgagctgaccaagaaccaggtgtccctgacctgcctggtgaagggcttctaccccagcgacatcgccgtggagtgggagagcaacggccagcccgagaacaactacaagaccaccccccctgtgctggacagcgatggcagcttcttcctgtacagcaagctgaccgtggacaagagcagatggcagcagggcaacgtgttcagctgcagcgtgatgcacgaggccctgcacaatcactacacccagaagagcctgagcctgtcccctggcaagtga

SEQ ID NO: 574 - DNA, 1026 bp, Artificial Sequence
  Synthetic
gacatccagatgacccagagccccagcagcctgagcgcctctgtgggcgatagagtgaccatcacctgcagagccagccaggccatcgacagctacctgcactggtatcagcagaagcctggcaaggcccctaagctgctgatctacagcgccagcaatctggagaccggcgtgcctagcagattcagcggcagcggctccggcaccgacttcaccctgaccatcagcagcctgctgcctgaggatttcgccacctactactgccagcaggtggtgtggagacctttcaccttcgaccagggcaccaaggtggagatcaagcgggtggagcccaagagcagcgataagacccacacctgccccccctgccctgcccccgagctgctgggcggacccagcgtgttcctgttcccccccaagcctaaggacaccctgatgatcagcagaacccccgaggtgacctgcgtggtggtggatgtgagccacgaggaccctgaggtgaagttcaactggtacgtggacggcgtggaggtgcacaatgccaagaccaagcccagggaggagcagtacaacagcacctaccgggtggtgtccgtgctgaccgtgctgcaccaggattggctgaacggcaaggagtacaagtgcaaggtgtccaacaaggccctgcctgcccctatcgagaaaaccatcagcaaggccaagggccagcccagagagccccaggtgtacaccctgccccctagcagagatgagctgaccaagaaccaggtgtccctgacctgcctggtgaagggcttctaccccagcgacatcgccgtggagtgggagagcaacggccagcccgagaacaactacaagaccaccccccctgtgctggacagcgatggcagcttcttcctgtacagcaagctgaccgtggacaagagcagatggcagcagggcaacgtgttcagctgcagcgtgatgcacgaggccctgcacaatcactacacccagaagagcctgagcctgtcccctggcaagtga

SEQ ID NO: 575 - DNA, 1026 bp, Artificial Sequence
  Synthetic
gacatccagatgacccagagccccagcagcctgagcgcctctgtgggcgatagagtgaccatcacctgcagagccagccaggccatcgacagctacctgcactggtatcagcagaagcctggcaaggcccctaagctgctgatctacagcgccagcaatctggagaccggcgtgcctagcagattcagcggcagcggctccggcaccgacttcaccctgaccatcagcagcctgctgcctgaggatttcgccacctactactgccagcaggtggtgtggagacctttcaccttccagcagggcaccaaggtggagatcaagcgggtggagcccaagagcagcgataagacccacacctgccccccctgccctgcccccgagctgctgggcggacccagcgtgttcctgttcccccccaagcctaaggacaccctgatgatcagcagaacccccgaggtgacctgcgtggtggtggatgtgagccacgaggaccctgaggtgaagttcaactggtacgtggacggcgtggaggtgcacaatgccaagaccaagcccagggaggagcagtacaacagcacctaccgggtggtgtccgtgctgaccgtgctgcaccaggattggctgaacggcaaggagtacaagtgcaaggtgtccaacaaggccctgcctgcccctatcgagaaaaccatcagcaaggccaagggccagcccagagagccccaggtgtacaccctgccccctagcagagatgagctgaccaagaaccaggtgtccctgacctgcctggtgaagggcttctaccccagcgacatcgccgtggagtgggagagcaacggccagcccgagaacaactacaagaccaccccccctgtgctggacagcgatggcagcttcttcctgtacagcaagctgaccgtggacaagagcagatggcagcagggcaacgtgttcagctgcagcgtgatgcacgaggccctgcacaatcactacacccagaagagcctgagcctgtcccctggcaagtga

SEQ ID NO: 576 - DNA, 1026 bp, Artificial Sequence
  Synthetic
gacatccagatgacccagagccccagcagcctgagcgcctctgtgggcgatagagtgaccatcacctgcagagccagccaggccatcgacagctacctgcactggtatcagcagaagcctggcaaggcccctaagctgctgatctacagcgccagcaatctggagaccggcgtgcctagcagattcagcggcagcggctccggcaccgacttcaccctgaccatcagcagcctgctgcctgaggatttcgccacctactactgccagcaggtggtgtggagacctttcaccttccaccagggcaccaaggtggagatcaagcgggtggagcccaagagcagcgataagacccacacctgccccccctgccctgcccccgagctgctgggcggacccagcgtgttcctgttcccccccaagcctaaggacaccctgatgatcagcagaacccccgaggtgacctgcgtggtggtggatgtgagccacgaggaccctgaggtgaagttcaactggtacgtggacggcgtggaggtgcacaatgccaagaccaagcccagggaggagcagtacaacagcacctaccgggtggtgtccgtgctgaccgtgctgcaccaggattggctgaacggcaaggagtacaagtgcaaggtgtccaacaaggccctgcctgcccctatcgagaaaaccatcagcaaggccaagggccagcccagagagccccaggtgtacaccctgccccctagcagagatgagctgaccaagaaccaggtgtccctgacctgcctggtgaagggcttctaccccagcgacatcgccgtggagtgggagagcaacggccagcccgagaacaactacaagaccaccccccctgtgctggacagcgatggcagcttcttcctgtacagcaagctgaccgtggacaagagcagatggcagcagggcaacgtgttcagctgcagcgtgatgcacgaggccctgcacaatcactacacccagaagagcctgagcctgtcccctggcaagtga

SEQ ID NO: 577 - DNA, 1026 bp, Artificial Sequence
  Synthetic
gacatccagatgacccagagccccagcagcctgagcgcctctgtgggcgatagagtgaccatcacctgcagagccagccaggccatcgacagctacctgcactggtatcagcagaagcctggcaaggcccctaagctgctgatctacagcgccagcaatctggagaccggcgtgcctagcagattcagcggcagcggctccggcaccgacttcaccctgaccatcagcagcctgctgcctgaggatttcgccacctactactgccagcaggtggtgtggagacctttcaccttcccccagggcaccaaggtggagatcaagcgggtggagcccaagagcagcgataagacccacacctgccccccctgccctgcccccgagctgctgggcggacccagcgtgttcctgttcccccccaagcctaaggacaccctgatgatcagcagaacccccgaggtgacctgcgtggtggtggatgtgagccacgaggaccctgaggtgaagttcaactggtacgtggacggcgtggaggtgcacaatgccaagaccaagcccagggaggagcagtacaacagcacctaccgggtggtgtccgtgctgaccgtgctgcaccaggattggctgaacggcaaggagtacaagtgcaaggtgtccaacaaggccctgcctgcccctatcgagaaaaccatcagcaaggccaagggccagcccagagagccccaggtgtacaccctgccccctagcagagatgagctgaccaagaaccaggtgtccctgacctgcctggtgaagggcttctaccccagcgacatcgccgtggagtgggagagcaacggccagcccgagaacaactacaagaccaccccccctgtgctggacagcgatggcagcttcttcctgtacagcaagctgaccgtggacaagagcagatggcagcagggcaacgtgttcagctgcagcgtgatgcacgaggccctgcacaatcactacacccagaagagcctgagcctgtcccctggcaagtga

SEQ ID NO: 578 - DNA, 1026 bp, Artificial Sequence
  Synthetic
gacatccagatgacccagagccccagcagcctgagcgcctctgtgggcgatagagtgaccatcacctgcagagccagccaggccatcgacagctacctgcactggtatcagcagaagcctggcaaggcccctaagctgctgatctacagcgccagcaatctggagaccggcgtgcctagcagattcagcggcagcggctccggcaccgacttcaccctgaccatcagcagcctgctgcctgaggatttcgccacctactactgccagcaggtggtgtggagacctttcaccttcaagcagggcaccaaggtggagatcaagcgggtggagcccaagagcagcgataagacccacacctgccccccctgccctgcccccgagctgctgggcggacccagcgtgttcctgttcccccccaagcctaaggacaccctgatgatcagcagaacccccgaggtgacctgcgtggtggtggatgtgagccacgaggaccctgaggtgaagttcaactggtacgtggacggcgtggaggtgcacaatgccaagaccaagcccagggaggagcagtacaacagcacctaccgggtggtgtccgtgctgaccgtgctgcaccaggattggctgaacggcaaggagtacaagtgcaaggtgtccaacaaggccctgcctgcccctatcgagaaaaccatcagcaaggccaagggccagcccagagagccccaggtgtacaccctgccccctagcagagatgagctgaccaagaaccaggtgtccctgacctgcctggtgaagggcttctaccccagcgacatcgccgtggagtgggagagcaacggccagcccgagaacaactacaagaccaccccccctgtgctggacagcgatggcagcttcttcctgtacagcaagctgaccgtggacaagagcagatggcagcagggcaacgtgttcagctgcagcgtgatgcacgaggccctgcacaatcactacacccagaagagcctgagcctgtcccctggcaagtga

SEQ ID NO: 579 - DNA, 1026 bp, Artificial Sequence
  Synthetic
gacatccagatgacccagagccccagcagcctgagcgcctctgtgggcgatagagtgaccatcacctgcagagccagccaggccatcgacagctacctgcactggtatcagcagaagcctggcaaggcccctaagctgctgatctacagcgccagcaatctggagaccggcgtgcctagcagattcagcggcagcggctccggcaccgacttcaccctgaccatcagcagcctgctgcctgaggatttcgccacctactactgccagcaggtggtgtggagacctttcaccttcggcagcggcaccaaggtggagatcaagcgggtggagcccaagagcagcgataagacccacacctgccccccctgccctgcccccgagctgctgggcggacccagcgtgttcctgttcccccccaagcctaaggacaccctgatgatcagcagaacccccgaggtgacctgcgtggtggtggatgtgagccacgaggaccctgaggtgaagttcaactggtacgtggacggcgtggaggtgcacaatgccaagaccaagcccagggaggagcagtacaacagcacctaccgggtggtgtccgtgctgaccgtgctgcaccaggattggctgaacggcaaggagtacaagtgcaaggtgtccaacaaggccctgcctgcccctatcgagaaaaccatcagcaaggccaagggccagcccagagagccccaggtgtacaccctgccccctagcagagatgagctgaccaagaaccaggtgtccctgacctgcctggtgaagggcttctaccccagcgacatcgccgtggagtgggagagcaacggccagcccgagaacaactacaagaccaccccccctgtgctggacagcgatggcagcttcttcctgtacagcaagctgaccgtggacaagagcagatggcagcagggcaacgtgttcagctgcagcgtgatgcacgaggccctgcacaatcactacacccagaagagcctgagcctgtcccctggcaagtga

SEQ ID NO: 580 - DNA, 1026 bp, Artificial Sequence
  Synthetic
gacatccagatgacccagagccccagcagcctgagcgcctctgtgggcgatagagtgaccatcacctgcagagccagccaggccatcgacagctacctgcactggtatcagcagaagcctggcaaggcccctaagctgctgatctacagcgccagcaatctggagaccggcgtgcctagcagattcagcggcagcggctccggcaccgacttcaccctgaccatcagcagcctgctgcctgaggatttcgccacctactactgccagcaggtggtgtggagacctttcaccttcggcctgggcaccaaggtggagatcaagcgggtggagcccaagagcagcgataagacccacacctgccccccctgccctgcccccgagctgctgggcggacccagcgtgttcctgttcccccccaagcctaaggacaccctgatgatcagcagaacccccgaggtgacctgcgtggtggtggatgtgagccacgaggaccctgaggtgaagttcaactggtacgtggacggcgtggaggtgcacaatgccaagaccaagcccagggaggagcagtacaacagcacctaccgggtggtgtccgtgctgaccgtgctgcaccaggattggctgaacggcaaggagtacaagtgcaaggtgtccaacaaggccctgcctgcccctatcgagaaaaccatcagcaaggccaagggccagcccagagagccccaggtgtacaccctgccccctagcagagatgagctgaccaagaaccaggtgtccctgacctgcctggtgaagggcttctaccccagcgacatcgccgtggagtgggagagcaacggccagcccgagaacaactacaagaccaccccccctgtgctggacagcgatggcagcttcttcctgtacagcaagctgaccgtggacaagagcagatggcagcagggcaacgtgttcagctgcagcgtgatgcacgaggccctgcacaatcactacacccagaagagcctgagcctgtcccctggcaagtga

SEQ ID NO: 581 - DNA, 1026 bp, Artificial Sequence
  Synthetic
gacatccagatgacccagagccccagcagcctgagcgcctctgtgggcgatagagtgaccatcacctgcagagccagccaggccatcgacagctacctgcactggtatcagcagaagcctggcaaggcccctaagctgctgatctacagcgccagcaatctggagaccggcgtgcctagcagattcagcggcagcggctccggcaccgacttcaccctgaccatcagcagcctgctgcctgaggatttcgccacctactactgccagcaggtggtgtggagacctttcaccttcggctacggcaccaaggtggagatcaagcgggtggagcccaagagcagcgataagacccacacctgccccccctgccctgcccccgagctgctgggcggacccagcgtgttcctgttcccccccaagcctaaggacaccctgatgatcagcagaacccccgaggtgacctgcgtggtggtggatgtgagccacgaggaccctgaggtgaagttcaactggtacgtggacggcgtggaggtgcacaatgccaagaccaagcccagggaggagcagtacaacagcacctaccgggtggtgtccgtgctgaccgtgctgcaccaggattggctgaacggcaaggagtacaagtgcaaggtgtccaacaaggccctgcctgcccctatcgagaaaaccatcagcaaggccaagggccagcccagagagccccaggtgtacaccctgccccctagcagagatgagctgaccaagaaccaggtgtccctgacctgcctggtgaagggcttctaccccagcgacatcgccgtggagtgggagagcaacggccagcccgagaacaactacaagaccaccccccctgtgctggacagcgatggcagcttcttcctgtacagcaagctgaccgtggacaagagcagatggcagcagggcaacgtgttcagctgcagcgtgatgcacgaggccctgcacaatcactacacccagaagagcctgagcctgtcccctggcaagtga

SEQ ID NO: 582 - DNA, 1026 bp, Artificial Sequence
  Synthetic
gacatccagatgacccagagccccagcagcctgagcgcctctgtgggcgatagagtgaccatcacctgcagagccagccaggccatcgacagctacctgcactggtatcagcagaagcctggcaaggcccctaagctgctgatctacagcgccagcaatctggagaccggcgtgcctagcagattcagcggcagcggctccggcaccgacttcaccctgaccatcagcagcctgctgcctgaggatttcgccacctactactgccagcaggtggtgtggagacctttcaccttcggcgacggcaccaaggtggagatcaagcgggtggagcccaagagcagcgataagacccacacctgccccccctgccctgcccccgagctgctgggcggacccagcgtgttcctgttcccccccaagcctaaggacaccctgatgatcagcagaacccccgaggtgacctgcgtggtggtggatgtgagccacgaggaccctgaggtgaagttcaactggtacgtggacggcgtggaggtgcacaatgccaagaccaagcccagggaggagcagtacaacagcacctaccgggtggtgtccgtgctgaccgtgctgcaccaggattggctgaacggcaaggagtacaagtgcaaggtgtccaacaaggccctgcctgcccctatcgagaaaaccatcagcaaggccaagggccagcccagagagccccaggtgtacaccctgccccctagcagagatgagctgaccaagaaccaggtgtccctgacctgcctggtgaagggcttctaccccagcgacatcgccgtggagtgggagagcaacggccagcccgagaacaactacaagaccaccccccctgtgctggacagcgatggcagcttcttcctgtacagcaagctgaccgtggacaagagcagatggcagcagggcaacgtgttcagctgcagcgtgatgcacgaggccctgcacaatcactacacccagaagagcctgagcctgtcccctggcaagtga

SEQ ID NO: 583 - DNA, 1026 bp, Artificial Sequence
  Synthetic
gacatccagatgacccagagccccagcagcctgagcgcctctgtgggcgatagagtgaccatcacctgcagagccagccaggccatcgacagctacctgcactggtatcagcagaagcctggcaaggcccctaagctgctgatctacagcgccagcaatctggagaccggcgtgcctagcagattcagcggcagcggctccggcaccgacttcaccctgaccatcagcagcctgctgcctgaggatttcgccacctactactgccagcaggtggtgtggagacctttcaccttcggccacggcaccaaggtggagatcaagcgggtggagcccaagagcagcgataagacccacacctgccccccctgccctgcccccgagctgctgggcggacccagcgtgttcctgttcccccccaagcctaaggacaccctgatgatcagcagaacccccgaggtgacctgcgtggtggtggatgtgagccacgaggaccctgaggtgaagttcaactggtacgtggacggcgtggaggtgcacaatgccaagaccaagcccagggaggagcagtacaacagcacctaccgggtggtgtccgtgctgaccgtgctgcaccaggattggctgaacggcaaggagtacaagtgcaaggtgtccaacaaggccctgcctgcccctatcgagaaaaccatcagcaaggccaagggccagcccagagagccccaggtgtacaccctgccccctagcagagatgagctgaccaagaaccaggtgtccctgacctgcctggtgaagggcttctaccccagcgacatcgccgtggagtgggagagcaacggccagcccgagaacaactacaagaccaccccccctgtgctggacagcgatggcagcttcttcctgtacagcaagctgaccgtggacaagagcagatggcagcagggcaacgtgttcagctgcagcgtgatgcacgaggccctgcacaatcactacacccagaagagcctgagcctgtcccctggcaagtga

SEQ ID NO: 584 - DNA, 1026 bp, Artificial Sequence
  Synthetic
gacatccagatgacccagagccccagcagcctgagcgcctctgtgggcgatagagtgaccatcacctgcagagccagccaggccatcgacagctacctgcactggtatcagcagaagcctggcaaggcccctaagctgctgatctacagcgccagcaatctggagaccggcgtgcctagcagattcagcggcagcggctccggcaccgacttcaccctgaccatcagcagcctgctgcctgaggatttcgccacctactactgccagcaggtggtgtggagacctttcaccttcggccccggcaccaaggtggagatcaagcgggtggagcccaagagcagcgataagacccacacctgccccccctgccctgcccccgagctgctgggcggacccagcgtgttcctgttcccccccaagcctaaggacaccctgatgatcagcagaacccccgaggtgacctgcgtggtggtggatgtgagccacgaggaccctgaggtgaagttcaactggtacgtggacggcgtggaggtgcacaatgccaagaccaagcccagggaggagcagtacaacagcacctaccgggtggtgtccgtgctgaccgtgctgcaccaggattggctgaacggcaaggagtacaagtgcaaggtgtccaacaaggccctgcctgcccctatcgagaaaaccatcagcaaggccaagggccagcccagagagccccaggtgtacaccctgccccctagcagagatgagctgaccaagaaccaggtgtccctgacctgcctggtgaagggcttctaccccagcgacatcgccgtggagtgggagagcaacggccagcccgagaacaactacaagaccaccccccctgtgctggacagcgatggcagcttcttcctgtacagcaagctgaccgtggacaagagcagatggcagcagggcaacgtgttcagctgcagcgtgatgcacgaggccctgcacaatcactacacccagaagagcctgagcctgtcccctggcaagtga

SEQ ID NO: 585 - DNA, 1026 bp, Artificial Sequence
  Synthetic
gacatccagatgacccagagccccagcagcctgagcgcctctgtgggcgatagagtgaccatcacctgcagagccagccaggccatcgacagctacctgcactggtatcagcagaagcctggcaaggcccctaagctgctgatctacagcgccagcaatctggagaccggcgtgcctagcagattcagcggcagcggctccggcaccgacttcaccctgaccatcagcagcctgctgcctgaggatttcgccacctactactgccagcaggtggtgtggagacctttcaccttcggcaagggcaccaaggtggagatcaagcgggtggagcccaagagcagcgataagacccacacctgccccccctgccctgcccccgagctgctgggcggacccagcgtgttcctgttcccccccaagcctaaggacaccctgatgatcagcagaacccccgaggtgacctgcgtggtggtggatgtgagccacgaggaccctgaggtgaagttcaactggtacgtggacggcgtggaggtgcacaatgccaagaccaagcccagggaggagcagtacaacagcacctaccgggtggtgtccgtgctgaccgtgctgcaccaggattggctgaacggcaaggagtacaagtgcaaggtgtccaacaaggccctgcctgcccctatcgagaaaaccatcagcaaggccaagggccagcccagagagccccaggtgtacaccctgccccctagcagagatgagctgaccaagaaccaggtgtccctgacctgcctggtgaagggcttctaccccagcgacatcgccgtggagtgggagagcaacggccagcccgagaacaactacaagaccaccccccctgtgctggacagcgatggcagcttcttcctgtacagcaagctgaccgtggacaagagcagatggcagcagggcaacgtgttcagctgcagcgtgatgcacgaggccctgcacaatcactacacccagaagagcctgagcctgtcccctggcaagtga

SEQ ID NO: 586 - DNA, 1026 bp, Artificial Sequence
  Synthetic
gacatccagatgacccagagccccagcagcctgagcgcctctgtgggcgatagagtgaccatcacctgcagagccagccaggccatcgacagctacctgcactggtatcagcagaagcctggcaaggcccctaagctgctgatctacagcgccagcaatctggagaccggcgtgcctagcagattcagcggcagcggctccggcaccgacttcaccctgaccatcagcagcctgctgcctgaggatttcgccacctactactgccagcaggtggtgtggagacctttcaccttcggccagagcaccaaggtggagatcaagcgggtggagcccaagagcagcgataagacccacacctgccccccctgccctgcccccgagctgctgggcggacccagcgtgttcctgttcccccccaagcctaaggacaccctgatgatcagcagaacccccgaggtgacctgcgtggtggtggatgtgagccacgaggaccctgaggtgaagttcaactggtacgtggacggcgtggaggtgcacaatgccaagaccaagcccagggaggagcagtacaacagcacctaccgggtggtgtccgtgctgaccgtgctgcaccaggattggctgaacggcaaggagtacaagtgcaaggtgtccaacaaggccctgcctgcccctatcgagaaaaccatcagcaaggccaagggccagcccagagagccccaggtgtacaccctgccccctagcagagatgagctgaccaagaaccaggtgtccctgacctgcctggtgaagggcttctaccccagcgacatcgccgtggagtgggagagcaacggccagcccgagaacaactacaagaccaccccccctgtgctggacagcgatggcagcttcttcctgtacagcaagctgaccgtggacaagagcagatggcagcagggcaacgtgttcagctgcagcgtgatgcacgaggccctgcacaatcactacacccagaagagcctgagcctgtcccctggcaagtga

SEQ ID NO: 587 - DNA, 1026 bp, Artificial Sequence
  Synthetic
gacatccagatgacccagagccccagcagcctgagcgcctctgtgggcgatagagtgaccatcacctgcagagccagccaggccatcgacagctacctgcactggtatcagcagaagcctggcaaggcccctaagctgctgatctacagcgccagcaatctggagaccggcgtgcctagcagattcagcggcagcggctccggcaccgacttcaccctgaccatcagcagcctgctgcctgaggatttcgccacctactactgccagcaggtggtgtggagacctttcaccttcggccagctgaccaaggtggagatcaagcgggtggagcccaagagcagcgataagacccacacctgccccccctgccctgcccccgagctgctgggcggacccagcgtgttcctgttcccccccaagcctaaggacaccctgatgatcagcagaacccccgaggtgacctgcgtggtggtggatgtgagccacgaggaccctgaggtgaagttcaactggtacgtggacggcgtggaggtgcacaatgccaagaccaagcccagggaggagcagtacaacagcacctaccgggtggtgtccgtgctgaccgtgctgcaccaggattggctgaacggcaaggagtacaagtgcaaggtgtccaacaaggccctgcctgcccctatcgagaaaaccatcagcaaggccaagggccagcccagagagccccaggtgtacaccctgccccctagcagagatgagctgaccaagaaccaggtgtccctgacctgcctggtgaagggcttctaccccagcgacatcgccgtggagtgggagagcaacggccagcccgagaacaactacaagaccaccccccctgtgctggacagcgatggcagcttcttcctgtacagcaagctgaccgtggacaagagcagatggcagcagggcaacgtgttcagctgcagcgtgatgcacgaggccctgcacaatcactacacccagaagagcctgagcctgtcccctggcaagtga

SEQ ID NO: 588 - DNA, 1026 bp, Artificial Sequence
  Synthetic
gacatccagatgacccagagccccagcagcctgagcgcctctgtgggcgatagagtgaccatcacctgcagagccagccaggccatcgacagctacctgcactggtatcagcagaagcctggcaaggcccctaagctgctgatctacagcgccagcaatctggagaccggcgtgcctagcagattcagcggcagcggctccggcaccgacttcaccctgaccatcagcagcctgctgcctgaggatttcgccacctactactgccagcaggtggtgtggagacctttcaccttcggccagtacaccaaggtggagatcaagcgggtggagcccaagagcagcgataagacccacacctgccccccctgccctgcccccgagctgctgggcggacccagcgtgttcctgttcccccccaagcctaaggacaccctgatgatcagcagaacccccgaggtgacctgcgtggtggtggatgtgagccacgaggaccctgaggtgaagttcaactggtacgtggacggcgtggaggtgcacaatgccaagaccaagcccagggaggagcagtacaacagcacctaccgggtggtgtccgtgctgaccgtgctgcaccaggattggctgaacggcaaggagtacaagtgcaaggtgtccaacaaggccctgcctgcccctatcgagaaaaccatcagcaaggccaagggccagcccagagagccccaggtgtacaccctgccccctagcagagatgagctgaccaagaaccaggtgtccctgacctgcctggtgaagggcttctaccccagcgacatcgccgtggagtgggagagcaacggccagcccgagaacaactacaagaccaccccccctgtgctggacagcgatggcagcttcttcctgtacagcaagctgaccgtggacaagagcagatggcagcagggcaacgtgttcagctgcagcgtgatgcacgaggccctgcacaatcactacacccagaagagcctgagcctgtcccctggcaagtga

SEQ ID NO: 589 - DNA, 1026 bp, Artificial Sequence
  Synthetic
gacatccagatgacccagagccccagcagcctgagcgcctctgtgggcgatagagtgaccatcacctgcagagccagccaggccatcgacagctacctgcactggtatcagcagaagcctggcaaggcccctaagctgctgatctacagcgccagcaatctggagaccggcgtgcctagcagattcagcggcagcggctccggcaccgacttcaccctgaccatcagcagcctgctgcctgaggatttcgccacctactactgccagcaggtggtgtggagacctttcaccttcggccaggacaccaaggtggagatcaagcgggtggagcccaagagcagcgataagacccacacctgccccccctgccctgcccccgagctgctgggcggacccagcgtgttcctgttcccccccaagcctaaggacaccctgatgatcagcagaacccccgaggtgacctgcgtggtggtggatgtgagccacgaggaccctgaggtgaagttcaactggtacgtggacggcgtggaggtgcacaatgccaagaccaagcccagggaggagcagtacaacagcacctaccgggtggtgtccgtgctgaccgtgctgcaccaggattggctgaacggcaaggagtacaagtgcaaggtgtccaacaaggccctgcctgcccctatcgagaaaaccatcagcaaggccaagggccagcccagagagccccaggtgtacaccctgccccctagcagagatgagctgaccaagaaccaggtgtccctgacctgcctggtgaagggcttctaccccagcgacatcgccgtggagtgggagagcaacggccagcccgagaacaactacaagaccaccccccctgtgctggacagcgatggcagcttcttcctgtacagcaagctgaccgtggacaagagcagatggcagcagggcaacgtgttcagctgcagcgtgatgcacgaggccctgcacaatcactacacccagaagagcctgagcctgtcccctggcaagtga

SEQ ID NO: 590 - DNA, 1026 bp, Artificial Sequence
  Synthetic
gacatccagatgacccagagccccagcagcctgagcgcctctgtgggcgatagagtgaccatcacctgcagagccagccaggccatcgacagctacctgcactggtatcagcagaagcctggcaaggcccctaagctgctgatctacagcgccagcaatctggagaccggcgtgcctagcagattcagcggcagcggctccggcaccgacttcaccctgaccatcagcagcctgctgcctgaggatttcgccacctactactgccagcaggtggtgtggagacctttcaccttcggccagcagaccaaggtggagatcaagcgggtggagcccaagagcagcgataagacccacacctgccccccctgccctgcccccgagctgctgggcggacccagcgtgttcctgttcccccccaagcctaaggacaccctgatgatcagcagaacccccgaggtgacctgcgtggtggtggatgtgagccacgaggaccctgaggtgaagttcaactggtacgtggacggcgtggaggtgcacaatgccaagaccaagcccagggaggagcagtacaacagcacctaccgggtggtgtccgtgctgaccgtgctgcaccaggattggctgaacggcaaggagtacaagtgcaaggtgtccaacaaggccctgcctgcccctatcgagaaaaccatcagcaaggccaagggccagcccagagagccccaggtgtacaccctgccccctagcagagatgagctgaccaagaaccaggtgtccctgacctgcctggtgaagggcttctaccccagcgacatcgccgtggagtgggagagcaacggccagcccgagaacaactacaagaccaccccccctgtgctggacagcgatggcagcttcttcctgtacagcaagctgaccgtggacaagagcagatggcagcagggcaacgtgttcagctgcagcgtgatgcacgaggccctgcacaatcactacacccagaagagcctgagcctgtcccctggcaagtga

SEQ ID NO: 591 - DNA, 1026 bp, Artificial Sequence
  Synthetic
gacatccagatgacccagagccccagcagcctgagcgcctctgtgggcgatagagtgaccatcacctgcagagccagccaggccatcgacagctacctgcactggtatcagcagaagcctggcaaggcccctaagctgctgatctacagcgccagcaatctggagaccggcgtgcctagcagattcagcggcagcggctccggcaccgacttcaccctgaccatcagcagcctgctgcctgaggatttcgccacctactactgccagcaggtggtgtggagacctttcaccttcggccagcacaccaaggtggagatcaagcgggtggagcccaagagcagcgataagacccacacctgccccccctgccctgcccccgagctgctgggcggacccagcgtgttcctgttcccccccaagcctaaggacaccctgatgatcagcagaacccccgaggtgacctgcgtggtggtggatgtgagccacgaggaccctgaggtgaagttcaactggtacgtggacggcgtggaggtgcacaatgccaagaccaagcccagggaggagcagtacaacagcacctaccgggtggtgtccgtgctgaccgtgctgcaccaggattggctgaacggcaaggagtacaagtgcaaggtgtccaacaaggccctgcctgcccctatcgagaaaaccatcagcaaggccaagggccagcccagagagccccaggtgtacaccctgccccctagcagagatgagctgaccaagaaccaggtgtccctgacctgcctggtgaagggcttctaccccagcgacatcgccgtggagtgggagagcaacggccagcccgagaacaactacaagaccaccccccctgtgctggacagcgatggcagcttcttcctgtacagcaagctgaccgtggacaagagcagatggcagcagggcaacgtgttcagctgcagcgtgatgcacgaggccctgcacaatcactacacccagaagagcctgagcctgtcccctggcaagtga

SEQ ID NO: 592 - DNA, 1026 bp, Artificial Sequence
  Synthetic
gacatccagatgacccagagccccagcagcctgagcgcctctgtgggcgatagagtgaccatcacctgcagagccagccaggccatcgacagctacctgcactggtatcagcagaagcctggcaaggcccctaagctgctgatctacagcgccagcaatctggagaccggcgtgcctagcagattcagcggcagcggctccggcaccgacttcaccctgaccatcagcagcctgctgcctgaggatttcgccacctactactgccagcaggtggtgtggagacctttcaccttcggccagcccaccaaggtggagatcaagcgggtggagcccaagagcagcgataagacccacacctgccccccctgccctgcccccgagctgctgggcggacccagcgtgttcctgttcccccccaagcctaaggacaccctgatgatcagcagaacccccgaggtgacctgcgtggtggtggatgtgagccacgaggaccctgaggtgaagttcaactggtacgtggacggcgtggaggtgcacaatgccaagaccaagcccagggaggagcagtacaacagcacctaccgggtggtgtccgtgctgaccgtgctgcaccaggattggctgaacggcaaggagtacaagtgcaaggtgtccaacaaggccctgcctgcccctatcgagaaaaccatcagcaaggccaagggccagcccagagagccccaggtgtacaccctgccccctagcagagatgagctgaccaagaaccaggtgtccctgacctgcctggtgaagggcttctaccccagcgacatcgccgtggagtgggagagcaacggccagcccgagaacaactacaagaccaccccccctgtgctggacagcgatggcagcttcttcctgtacagcaagctgaccgtggacaagagcagatggcagcagggcaacgtgttcagctgcagcgtgatgcacgaggccctgcacaatcactacacccagaagagcctgagcctgtcccctggcaagtga

SEQ ID NO: 593 - DNA, 1026 bp, Artificial Sequence
  Synthetic
gacatccagatgacccagagccccagcagcctgagcgcctctgtgggcgatagagtgaccatcacctgcagagccagccaggccatcgacagctacctgcactggtatcagcagaagcctggcaaggcccctaagctgctgatctacagcgccagcaatctggagaccggcgtgcctagcagattcagcggcagcggctccggcaccgacttcaccctgaccatcagcagcctgctgcctgaggatttcgccacctactactgccagcaggtggtgtggagacctttcaccttcggccagaagaccaaggtggagatcaagcgggtggagcccaagagcagcgataagacccacacctgccccccctgccctgcccccgagctgctgggcggacccagcgtgttcctgttcccccccaagcctaaggacaccctgatgatcagcagaacccccgaggtgacctgcgtggtggtggatgtgagccacgaggaccctgaggtgaagttcaactggtacgtggacggcgtggaggtgcacaatgccaagaccaagcccagggaggagcagtacaacagcacctaccgggtggtgtccgtgctgaccgtgctgcaccaggattggctgaacggcaaggagtacaagtgcaaggtgtccaacaaggccctgcctgcccctatcgagaaaaccatcagcaaggccaagggccagcccagagagccccaggtgtacaccctgccccctagcagagatgagctgaccaagaaccaggtgtccctgacctgcctggtgaagggcttctaccccagcgacatcgccgtggagtgggagagcaacggccagcccgagaacaactacaagaccaccccccctgtgctggacagcgatggcagcttcttcctgtacagcaagctgaccgtggacaagagcagatggcagcagggcaacgtgttcagctgcagcgtgatgcacgaggccctgcacaatcactacacccagaagagcctgagcctgtcccctggcaagtga

SEQ ID NO: 594 - DNA, 1026 bp, Artificial Sequence
  Synthetic
gacatccagatgacccagagccccagcagcctgagcgcctctgtgggcgatagagtgaccatcacctgcagagccagccaggccatcgacagctacctgcactggtatcagcagaagcctggcaaggcccctaagctgctgatctacagcgccagcaatctggagaccggcgtgcctagcagattcagcggcagcggctccggcaccgacttcaccctgaccatcagcagcctgctgcctgaggatttcgccacctactactgccagcaggtggtgtggagacctttcaccttcggccagggcctgaaggtggagatcaagcgggtggagcccaagagcagcgataagacccacacctgccccccctgccctgcccccgagctgctgggcggacccagcgtgttcctgttcccccccaagcctaaggacaccctgatgatcagcagaacccccgaggtgacctgcgtggtggtggatgtgagccacgaggaccctgaggtgaagttcaactggtacgtggacggcgtggaggtgcacaatgccaagaccaagcccagggaggagcagtacaacagcacctaccgggtggtgtccgtgctgaccgtgctgcaccaggattggctgaacggcaaggagtacaagtgcaaggtgtccaacaaggccctgcctgcccctatcgagaaaaccatcagcaaggccaagggccagcccagagagccccaggtgtacaccctgccccctagcagagatgagctgaccaagaaccaggtgtccctgacctgcctggtgaagggcttctaccccagcgacatcgccgtggagtgggagagcaacggccagcccgagaacaactacaagaccaccccccctgtgctggacagcgatggcagcttcttcctgtacagcaagctgaccgtggacaagagcagatggcagcagggcaacgtgttcagctgcagcgtgatgcacgaggccctgcacaatcactacacccagaagagcctgagcctgtcccctggcaagtga

SEQ ID NO: 595 - DNA, 1026 bp, Artificial Sequence
  Synthetic
gacatccagatgacccagagccccagcagcctgagcgcctctgtgggcgatagagtgaccatcacctgcagagccagccaggccatcgacagctacctgcactggtatcagcagaagcctggcaaggcccctaagctgctgatctacagcgccagcaatctggagaccggcgtgcctagcagattcagcggcagcggctccggcaccgacttcaccctgaccatcagcagcctgctgcctgaggatttcgccacctactactgccagcaggtggtgtggagacctttcaccttcggccagggctacaaggtggagatcaagcgggtggagcccaagagcagcgataagacccacacctgccccccctgccctgcccccgagctgctgggcggacccagcgtgttcctgttcccccccaagcctaaggacaccctgatgatcagcagaacccccgaggtgacctgcgtggtggtggatgtgagccacgaggaccctgaggtgaagttcaactggtacgtggacggcgtggaggtgcacaatgccaagaccaagcccagggaggagcagtacaacagcacctaccgggtggtgtccgtgctgaccgtgctgcaccaggattggctgaacggcaaggagtacaagtgcaaggtgtccaacaaggccctgcctgcccctatcgagaaaaccatcagcaaggccaagggccagcccagagagccccaggtgtacaccctgccccctagcagagatgagctgaccaagaaccaggtgtccctgacctgcctggtgaagggcttctaccccagcgacatcgccgtggagtgggagagcaacggccagcccgagaacaactacaagaccaccccccctgtgctggacagcgatggcagcttcttcctgtacagcaagctgaccgtggacaagagcagatggcagcagggcaacgtgttcagctgcagcgtgatgcacgaggccctgcacaatcactacacccagaagagcctgagcctgtcccctggcaagtga

SEQ ID NO: 596 - DNA, 1026 bp, Artificial Sequence
  Synthetic
gacatccagatgacccagagccccagcagcctgagcgcctctgtgggcgatagagtgaccatcacctgcagagccagccaggccatcgacagctacctgcactggtatcagcagaagcctggcaaggcccctaagctgctgatctacagcgccagcaatctggagaccggcgtgcctagcagattcagcggcagcggctccggcaccgacttcaccctgaccatcagcagcctgctgcctgaggatttcgccacctactactgccagcaggtggtgtggagacctttcaccttcggccagggcgacaaggtggagatcaagcgggtggagcccaagagcagcgataagacccacacctgccccccctgccctgcccccgagctgctgggcggacccagcgtgttcctgttcccccccaagcctaaggacaccctgatgatcagcagaacccccgaggtgacctgcgtggtggtggatgtgagccacgaggaccctgaggtgaagttcaactggtacgtggacggcgtggaggtgcacaatgccaagaccaagcccagggaggagcagtacaacagcacctaccgggtggtgtccgtgctgaccgtgctgcaccaggattggctgaacggcaaggagtacaagtgcaaggtgtccaacaaggccctgcctgcccctatcgagaaaaccatcagcaaggccaagggccagcccagagagccccaggtgtacaccctgccccctagcagagatgagctgaccaagaaccaggtgtccctgacctgcctggtgaagggcttctaccccagcgacatcgccgtggagtgggagagcaacggccagcccgagaacaactacaagaccaccccccctgtgctggacagcgatggcagcttcttcctgtacagcaagctgaccgtggacaagagcagatggcagcagggcaacgtgttcagctgcagcgtgatgcacgaggccctgcacaatcactacacccagaagagcctgagcctgtcccctggcaagtga

SEQ ID NO: 597 - DNA, 1026 bp, Artificial Sequence
  Synthetic
gacatccagatgacccagagccccagcagcctgagcgcctctgtgggcgatagagtgaccatcacctgcagagccagccaggccatcgacagctacctgcactggtatcagcagaagcctggcaaggcccctaagctgctgatctacagcgccagcaatctggagaccggcgtgcctagcagattcagcggcagcggctccggcaccgacttcaccctgaccatcagcagcctgctgcctgaggatttcgccacctactactgccagcaggtggtgtggagacctttcaccttcggccagggccagaaggtggagatcaagcgggtggagcccaagagcagcgataagacccacacctgccccccctgccctgcccccgagctgctgggcggacccagcgtgttcctgttcccccccaagcctaaggacaccctgatgatcagcagaacccccgaggtgacctgcgtggtggtggatgtgagccacgaggaccctgaggtgaagttcaactggtacgtggacggcgtggaggtgcacaatgccaagaccaagcccagggaggagcagtacaacagcacctaccgggtggtgtccgtgctgaccgtgctgcaccaggattggctgaacggcaaggagtacaagtgcaaggtgtccaacaaggccctgcctgcccctatcgagaaaaccatcagcaaggccaagggccagcccagagagccccaggtgtacaccctgccccctagcagagatgagctgaccaagaaccaggtgtccctgacctgcctggtgaagggcttctaccccagcgacatcgccgtggagtgggagagcaacggccagcccgagaacaactacaagaccaccccccctgtgctggacagcgatggcagcttcttcctgtacagcaagctgaccgtggacaagagcagatggcagcagggcaacgtgttcagctgcagcgtgatgcacgaggccctgcacaatcactacacccagaagagcctgagcctgtcccctggcaagtga

SEQ ID NO: 598 - DNA, 1026 bp, Artificial Sequence
  Synthetic
gacatccagatgacccagagccccagcagcctgagcgcctctgtgggcgatagagtgaccatcacctgcagagccagccaggccatcgacagctacctgcactggtatcagcagaagcctggcaaggcccctaagctgctgatctacagcgccagcaatctggagaccggcgtgcctagcagattcagcggcagcggctccggcaccgacttcaccctgaccatcagcagcctgctgcctgaggatttcgccacctactactgccagcaggtggtgtggagacctttcaccttcggccagggccacaaggtggagatcaagcgggtggagcccaagagcagcgataagacccacacctgccccccctgccctgcccccgagctgctgggcggacccagcgtgttcctgttcccccccaagcctaaggacaccctgatgatcagcagaacccccgaggtgacctgcgtggtggtggatgtgagccacgaggaccctgaggtgaagttcaactggtacgtggacggcgtggaggtgcacaatgccaagaccaagcccagggaggagcagtacaacagcacctaccgggtggtgtccgtgctgaccgtgctgcaccaggattggctgaacggcaaggagtacaagtgcaaggtgtccaacaaggccctgcctgcccctatcgagaaaaccatcagcaaggccaagggccagcccagagagccccaggtgtacaccctgccccctagcagagatgagctgaccaagaaccaggtgtccctgacctgcctggtgaagggcttctaccccagcgacatcgccgtggagtgggagagcaacggccagcccgagaacaactacaagaccaccccccctgtgctggacagcgatggcagcttcttcctgtacagcaagctgaccgtggacaagagcagatggcagcagggcaacgtgttcagctgcagcgtgatgcacgaggccctgcacaatcactacacccagaagagcctgagcctgtcccctggcaagtga

SEQ ID NO: 599 - DNA, 1026 bp, Artificial Sequence
  Synthetic
gacatccagatgacccagagccccagcagcctgagcgcctctgtgggcgatagagtgaccatcacctgcagagccagccaggccatcgacagctacctgcactggtatcagcagaagcctggcaaggcccctaagctgctgatctacagcgccagcaatctggagaccggcgtgcctagcagattcagcggcagcggctccggcaccgacttcaccctgaccatcagcagcctgctgcctgaggatttcgccacctactactgccagcaggtggtgtggagacctttcaccttcggccagggccccaaggtggagatcaagcgggtggagcccaagagcagcgataagacccacacctgccccccctgccctgcccccgagctgctgggcggacccagcgtgttcctgttcccccccaagcctaaggacaccctgatgatcagcagaacccccgaggtgacctgcgtggtggtggatgtgagccacgaggaccctgaggtgaagttcaactggtacgtggacggcgtggaggtgcacaatgccaagaccaagcccagggaggagcagtacaacagcacctaccgggtggtgtccgtgctgaccgtgctgcaccaggattggctgaacggcaaggagtacaagtgcaaggtgtccaacaaggccctgcctgcccctatcgagaaaaccatcagcaaggccaagggccagcccagagagccccaggtgtacaccctgccccctagcagagatgagctgaccaagaaccaggtgtccctgacctgcctggtgaagggcttctaccccagcgacatcgccgtggagtgggagagcaacggccagcccgagaacaactacaagaccaccccccctgtgctggacagcgatggcagcttcttcctgtacagcaagctgaccgtggacaagagcagatggcagcagggcaacgtgttcagctgcagcgtgatgcacgaggccctgcacaatcactacacccagaagagcctgagcctgtcccctggcaagtga

SEQ ID NO: 600 - DNA, 1026 bp, Artificial Sequence
  Synthetic
gacatccagatgacccagagccccagcagcctgagcgcctctgtgggcgatagagtgaccatcacctgcagagccagccaggccatcgacagctacctgcactggtatcagcagaagcctggcaaggcccctaagctgctgatctacagcgccagcaatctggagaccggcgtgcctagcagattcagcggcagcggctccggcaccgacttcaccctgaccatcagcagcctgctgcctgaggatttcgccacctactactgccagcaggtggtgtggagacctttcaccttcggccagggcaagaaggtggagatcaagcgggtggagcccaagagcagcgataagacccacacctgccccccctgccctgcccccgagctgctgggcggacccagcgtgttcctgttcccccccaagcctaaggacaccctgatgatcagcagaacccccgaggtgacctgcgtggtggtggatgtgagccacgaggaccctgaggtgaagttcaactggtacgtggacggcgtggaggtgcacaatgccaagaccaagcccagggaggagcagtacaacagcacctaccgggtggtgtccgtgctgaccgtgctgcaccaggattggctgaacggcaaggagtacaagtgcaaggtgtccaacaaggccctgcctgcccctatcgagaaaaccatcagcaaggccaagggccagcccagagagccccaggtgtacaccctgccccctagcagagatgagctgaccaagaaccaggtgtccctgacctgcctggtgaagggcttctaccccagcgacatcgccgtggagtgggagagcaacggccagcccgagaacaactacaagaccaccccccctgtgctggacagcgatggcagcttcttcctgtacagcaagctgaccgtggacaagagcagatggcagcagggcaacgtgttcagctgcagcgtgatgcacgaggccctgcacaatcactacacccagaagagcctgagcctgtcccctggcaagtga

SEQ ID NO: 601 - DNA, 1026 bp, Artificial Sequence
  Synthetic
gacatccagatgacccagagccccagcagcctgagcgcctctgtgggcgatagagtgaccatcacctgcagagccagccaggccatcgacagctacctgcactggtatcagcagaagcctggcaaggcccctaagctgctgatctacagcgccagcaatctggagaccggcgtgcctagcagattcagcggcagcggctccggcaccgacttcaccctgaccatcagcagcctgctgcctgaggatttcgccacctactactgccagcaggtggtgtggagacctttcaccttcggccagggcaccagcgtggagatcaagcgggtggagcccaagagcagcgataagacccacacctgccccccctgccctgcccccgagctgctgggcggacccagcgtgttcctgttcccccccaagcctaaggacaccctgatgatcagcagaacccccgaggtgacctgcgtggtggtggatgtgagccacgaggaccctgaggtgaagttcaactggtacgtggacggcgtggaggtgcacaatgccaagaccaagcccagggaggagcagtacaacagcacctaccgggtggtgtccgtgctgaccgtgctgcaccaggattggctgaacggcaaggagtacaagtgcaaggtgtccaacaaggccctgcctgcccctatcgagaaaaccatcagcaaggccaagggccagcccagagagccccaggtgtacaccctgccccctagcagagatgagctgaccaagaaccaggtgtccctgacctgcctggtgaagggcttctaccccagcgacatcgccgtggagtgggagagcaacggccagcccgagaacaactacaagaccaccccccctgtgctggacagcgatggcagcttcttcctgtacagcaagctgaccgtggacaagagcagatggcagcagggcaacgtgttcagctgcagcgtgatgcacgaggccctgcacaatcactacacccagaagagcctgagcctgtcccctggcaagtga

SEQ ID NO: 602 - DNA, 1026 bp, Artificial Sequence
  Synthetic
gacatccagatgacccagagccccagcagcctgagcgcctctgtgggcgatagagtgaccatcacctgcagagccagccaggccatcgacagctacctgcactggtatcagcagaagcctggcaaggcccctaagctgctgatctacagcgccagcaatctggagaccggcgtgcctagcagattcagcggcagcggctccggcaccgacttcaccctgaccatcagcagcctgctgcctgaggatttcgccacctactactgccagcaggtggtgtggagacctttcaccttcggccagggcaccctggtggagatcaagcgggtggagcccaagagcagcgataagacccacacctgccccccctgccctgcccccgagctgctgggcggacccagcgtgttcctgttcccccccaagcctaaggacaccctgatgatcagcagaacccccgaggtgacctgcgtggtggtggatgtgagccacgaggaccctgaggtgaagttcaactggtacgtggacggcgtggaggtgcacaatgccaagaccaagcccagggaggagcagtacaacagcacctaccgggtggtgtccgtgctgaccgtgctgcaccaggattggctgaacggcaaggagtacaagtgcaaggtgtccaacaaggccctgcctgcccctatcgagaaaaccatcagcaaggccaagggccagcccagagagccccaggtgtacaccctgccccctagcagagatgagctgaccaagaaccaggtgtccctgacctgcctggtgaagggcttctaccccagcgacatcgccgtggagtgggagagcaacggccagcccgagaacaactacaagaccaccccccctgtgctggacagcgatggcagcttcttcctgtacagcaagctgaccgtggacaagagcagatggcagcagggcaacgtgttcagctgcagcgtgatgcacgaggccctgcacaatcactacacccagaagagcctgagcctgtcccctggcaagtga

SEQ ID NO: 603 - DNA, 1026 bp, Artificial Sequence
  Synthetic
gacatccagatgacccagagccccagcagcctgagcgcctctgtgggcgatagagtgaccatcacctgcagagccagccaggccatcgacagctacctgcactggtatcagcagaagcctggcaaggcccctaagctgctgatctacagcgccagcaatctggagaccggcgtgcctagcagattcagcggcagcggctccggcaccgacttcaccctgaccatcagcagcctgctgcctgaggatttcgccacctactactgccagcaggtggtgtggagacctttcaccttcggccagggcacctacgtggagatcaagcgggtggagcccaagagcagcgataagacccacacctgccccccctgccctgcccccgagctgctgggcggacccagcgtgttcctgttcccccccaagcctaaggacaccctgatgatcagcagaacccccgaggtgacctgcgtggtggtggatgtgagccacgaggaccctgaggtgaagttcaactggtacgtggacggcgtggaggtgcacaatgccaagaccaagcccagggaggagcagtacaacagcacctaccgggtggtgtccgtgctgaccgtgctgcaccaggattggctgaacggcaaggagtacaagtgcaaggtgtccaacaaggccctgcctgcccctatcgagaaaaccatcagcaaggccaagggccagcccagagagccccaggtgtacaccctgccccctagcagagatgagctgaccaagaaccaggtgtccctgacctgcctggtgaagggcttctaccccagcgacatcgccgtggagtgggagagcaacggccagcccgagaacaactacaagaccaccccccctgtgctggacagcgatggcagcttcttcctgtacagcaagctgaccgtggacaagagcagatggcagcagggcaacgtgttcagctgcagcgtgatgcacgaggccctgcacaatcactacacccagaagagcctgagcctgtcccctggcaagtga

SEQ ID NO: 604 - DNA, 1026 bp, Artificial Sequence
  Synthetic
gacatccagatgacccagagccccagcagcctgagcgcctctgtgggcgatagagtgaccatcacctgcagagccagccaggccatcgacagctacctgcactggtatcagcagaagcctggcaaggcccctaagctgctgatctacagcgccagcaatctggagaccggcgtgcctagcagattcagcggcagcggctccggcaccgacttcaccctgaccatcagcagcctgctgcctgaggatttcgccacctactactgccagcaggtggtgtggagacctttcaccttcggccagggcaccgacgtggagatcaagcgggtggagcccaagagcagcgataagacccacacctgccccccctgccctgcccccgagctgctgggcggacccagcgtgttcctgttcccccccaagcctaaggacaccctgatgatcagcagaacccccgaggtgacctgcgtggtggtggatgtgagccacgaggaccctgaggtgaagttcaactggtacgtggacggcgtggaggtgcacaatgccaagaccaagcccagggaggagcagtacaacagcacctaccgggtggtgtccgtgctgaccgtgctgcaccaggattggctgaacggcaaggagtacaagtgcaaggtgtccaacaaggccctgcctgcccctatcgagaaaaccatcagcaaggccaagggccagcccagagagccccaggtgtacaccctgccccctagcagagatgagctgaccaagaaccaggtgtccctgacctgcctggtgaagggcttctaccccagcgacatcgccgtggagtgggagagcaacggccagcccgagaacaactacaagaccaccccccctgtgctggacagcgatggcagcttcttcctgtacagcaagctgaccgtggacaagagcagatggcagcagggcaacgtgttcagctgcagcgtgatgcacgaggccctgcacaatcactacacccagaagagcctgagcctgtcccctggcaagtga

SEQ ID NO: 605 - DNA, 1026 bp, Artificial Sequence
  Synthetic
gacatccagatgacccagagccccagcagcctgagcgcctctgtgggcgatagagtgaccatcacctgcagagccagccaggccatcgacagctacctgcactggtatcagcagaagcctggcaaggcccctaagctgctgatctacagcgccagcaatctggagaccggcgtgcctagcagattcagcggcagcggctccggcaccgacttcaccctgaccatcagcagcctgctgcctgaggatttcgccacctactactgccagcaggtggtgtggagacctttcaccttcggccagggcacccaggtggagatcaagcgggtggagcccaagagcagcgataagacccacacctgccccccctgccctgcccccgagctgctgggcggacccagcgtgttcctgttcccccccaagcctaaggacaccctgatgatcagcagaacccccgaggtgacctgcgtggtggtggatgtgagccacgaggaccctgaggtgaagttcaactggtacgtggacggcgtggaggtgcacaatgccaagaccaagcccagggaggagcagtacaacagcacctaccgggtggtgtccgtgctgaccgtgctgcaccaggattggctgaacggcaaggagtacaagtgcaaggtgtccaacaaggccctgcctgcccctatcgagaaaaccatcagcaaggccaagggccagcccagagagccccaggtgtacaccctgccccctagcagagatgagctgaccaagaaccaggtgtccctgacctgcctggtgaagggcttctaccccagcgacatcgccgtggagtgggagagcaacggccagcccgagaacaactacaagaccaccccccctgtgctggacagcgatggcagcttcttcctgtacagcaagctgaccgtggacaagagcagatggcagcagggcaacgtgttcagctgcagcgtgatgcacgaggccctgcacaatcactacacccagaagagcctgagcctgtcccctggcaagtga

SEQ ID NO: 606 - DNA, 1026 bp, Artificial Sequence
  Synthetic
gacatccagatgacccagagccccagcagcctgagcgcctctgtgggcgatagagtgaccatcacctgcagagccagccaggccatcgacagctacctgcactggtatcagcagaagcctggcaaggcccctaagctgctgatctacagcgccagcaatctggagaccggcgtgcctagcagattcagcggcagcggctccggcaccgacttcaccctgaccatcagcagcctgctgcctgaggatttcgccacctactactgccagcaggtggtgtggagacctttcaccttcggccagggcacccacgtggagatcaagcgggtggagcccaagagcagcgataagacccacacctgccccccctgccctgcccccgagctgctgggcggacccagcgtgttcctgttcccccccaagcctaaggacaccctgatgatcagcagaacccccgaggtgacctgcgtggtggtggatgtgagccacgaggaccctgaggtgaagttcaactggtacgtggacggcgtggaggtgcacaatgccaagaccaagcccagggaggagcagtacaacagcacctaccgggtggtgtccgtgctgaccgtgctgcaccaggattggctgaacggcaaggagtacaagtgcaaggtgtccaacaaggccctgcctgcccctatcgagaaaaccatcagcaaggccaagggccagcccagagagccccaggtgtacaccctgccccctagcagagatgagctgaccaagaaccaggtgtccctgacctgcctggtgaagggcttctaccccagcgacatcgccgtggagtgggagagcaacggccagcccgagaacaactacaagaccaccccccctgtgctggacagcgatggcagcttcttcctgtacagcaagctgaccgtggacaagagcagatggcagcagggcaacgtgttcagctgcagcgtgatgcacgaggccctgcacaatcactacacccagaagagcctgagcctgtcccctggcaagtga

SEQ ID NO: 607 - DNA, 1026 bp, Artificial Sequence
  Synthetic
gacatccagatgacccagagccccagcagcctgagcgcctctgtgggcgatagagtgaccatcacctgcagagccagccaggccatcgacagctacctgcactggtatcagcagaagcctggcaaggcccctaagctgctgatctacagcgccagcaatctggagaccggcgtgcctagcagattcagcggcagcggctccggcaccgacttcaccctgaccatcagcagcctgctgcctgaggatttcgccacctactactgccagcaggtggtgtggagacctttcaccttcggccagggcacccccgtggagatcaagcgggtggagcccaagagcagcgataagacccacacctgccccccctgccctgcccccgagctgctgggcggacccagcgtgttcctgttcccccccaagcctaaggacaccctgatgatcagcagaacccccgaggtgacctgcgtggtggtggatgtgagccacgaggaccctgaggtgaagttcaactggtacgtggacggcgtggaggtgcacaatgccaagaccaagcccagggaggagcagtacaacagcacctaccgggtggtgtccgtgctgaccgtgctgcaccaggattggctgaacggcaaggagtacaagtgcaaggtgtccaacaaggccctgcctgcccctatcgagaaaaccatcagcaaggccaagggccagcccagagagccccaggtgtacaccctgccccctagcagagatgagctgaccaagaaccaggtgtccctgacctgcctggtgaagggcttctaccccagcgacatcgccgtggagtgggagagcaacggccagcccgagaacaactacaagaccaccccccctgtgctggacagcgatggcagcttcttcctgtacagcaagctgaccgtggacaagagcagatggcagcagggcaacgtgttcagctgcagcgtgatgcacgaggccctgcacaatcactacacccagaagagcctgagcctgtcccctggcaagtga

SEQ ID NO: 608 - DNA, 1026 bp, Artificial Sequence
  Synthetic
gacatccagatgacccagagccccagcagcctgagcgcctctgtgggcgatagagtgaccatcacctgcagagccagccaggccatcgacagctacctgcactggtatcagcagaagcctggcaaggcccctaagctgctgatctacagcgccagcaatctggagaccggcgtgcctagcagattcagcggcagcggctccggcaccgacttcaccctgaccatcagcagcctgctgcctgaggatttcgccacctactactgccagcaggtggtgtggagacctttcaccttcggccagggcaccaagagcgagatcaagcgggtggagcccaagagcagcgataagacccacacctgccccccctgccctgcccccgagctgctgggcggacccagcgtgttcctgttcccccccaagcctaaggacaccctgatgatcagcagaacccccgaggtgacctgcgtggtggtggatgtgagccacgaggaccctgaggtgaagttcaactggtacgtggacggcgtggaggtgcacaatgccaagaccaagcccagggaggagcagtacaacagcacctaccgggtggtgtccgtgctgaccgtgctgcaccaggattggctgaacggcaaggagtacaagtgcaaggtgtccaacaaggccctgcctgcccctatcgagaaaaccatcagcaaggccaagggccagcccagagagccccaggtgtacaccctgccccctagcagagatgagctgaccaagaaccaggtgtccctgacctgcctggtgaagggcttctaccccagcgacatcgccgtggagtgggagagcaacggccagcccgagaacaactacaagaccaccccccctgtgctggacagcgatggcagcttcttcctgtacagcaagctgaccgtggacaagagcagatggcagcagggcaacgtgttcagctgcagcgtgatgcacgaggccctgcacaatcactacacccagaagagcctgagcctgtcccctggcaagtga

SEQ ID NO: 609 - DNA, 1026 bp, Artificial Sequence
  Synthetic
gacatccagatgacccagagccccagcagcctgagcgcctctgtgggcgatagagtgaccatcacctgcagagccagccaggccatcgacagctacctgcactggtatcagcagaagcctggcaaggcccctaagctgctgatctacagcgccagcaatctggagaccggcgtgcctagcagattcagcggcagcggctccggcaccgacttcaccctgaccatcagcagcctgctgcctgaggatttcgccacctactactgccagcaggtggtgtggagacctttcaccttcggccagggcaccaagtacgagatcaagcgggtggagcccaagagcagcgataagacccacacctgccccccctgccctgcccccgagctgctgggcggacccagcgtgttcctgttcccccccaagcctaaggacaccctgatgatcagcagaacccccgaggtgacctgcgtggtggtggatgtgagccacgaggaccctgaggtgaagttcaactggtacgtggacggcgtggaggtgcacaatgccaagaccaagcccagggaggagcagtacaacagcacctaccgggtggtgtccgtgctgaccgtgctgcaccaggattggctgaacggcaaggagtacaagtgcaaggtgtccaacaaggccctgcctgcccctatcgagaaaaccatcagcaaggccaagggccagcccagagagccccaggtgtacaccctgccccctagcagagatgagctgaccaagaaccaggtgtccctgacctgcctggtgaagggcttctaccccagcgacatcgccgtggagtgggagagcaacggccagcccgagaacaactacaagaccaccccccctgtgctggacagcgatggcagcttcttcctgtacagcaagctgaccgtggacaagagcagatggcagcagggcaacgtgttcagctgcagcgtgatgcacgaggccctgcacaatcactacacccagaagagcctgagcctgtcccctggcaagtga

SEQ ID NO: 610 - DNA, 1026 bp, Artificial Sequence
  Synthetic
gacatccagatgacccagagccccagcagcctgagcgcctctgtgggcgatagagtgaccatcacctgcagagccagccaggccatcgacagctacctgcactggtatcagcagaagcctggcaaggcccctaagctgctgatctacagcgccagcaatctggagaccggcgtgcctagcagattcagcggcagcggctccggcaccgacttcaccctgaccatcagcagcctgctgcctgaggatttcgccacctactactgccagcaggtggtgtggagacctttcaccttcggccagggcaccaaggacgagatcaagcgggtggagcccaagagcagcgataagacccacacctgccccccctgccctgcccccgagctgctgggcggacccagcgtgttcctgttcccccccaagcctaaggacaccctgatgatcagcagaacccccgaggtgacctgcgtggtggtggatgtgagccacgaggaccctgaggtgaagttcaactggtacgtggacggcgtggaggtgcacaatgccaagaccaagcccagggaggagcagtacaacagcacctaccgggtggtgtccgtgctgaccgtgctgcaccaggattggctgaacggcaaggagtacaagtgcaaggtgtccaacaaggccctgcctgcccctatcgagaaaaccatcagcaaggccaagggccagcccagagagccccaggtgtacaccctgccccctagcagagatgagctgaccaagaaccaggtgtccctgacctgcctggtgaagggcttctaccccagcgacatcgccgtggagtgggagagcaacggccagcccgagaacaactacaagaccaccccccctgtgctggacagcgatggcagcttcttcctgtacagcaagctgaccgtggacaagagcagatggcagcagggcaacgtgttcagctgcagcgtgatgcacgaggccctgcacaatcactacacccagaagagcctgagcctgtcccctggcaagtga

SEQ ID NO: 611 - DNA, 1026 bp, Artificial Sequence
  Synthetic
gacatccagatgacccagagccccagcagcctgagcgcctctgtgggcgatagagtgaccatcacctgcagagccagccaggccatcgacagctacctgcactggtatcagcagaagcctggcaaggcccctaagctgctgatctacagcgccagcaatctggagaccggcgtgcctagcagattcagcggcagcggctccggcaccgacttcaccctgaccatcagcagcctgctgcctgaggatttcgccacctactactgccagcaggtggtgtggagacctttcaccttcggccagggcaccaagcaggagatcaagcgggtggagcccaagagcagcgataagacccacacctgccccccctgccctgcccccgagctgctgggcggacccagcgtgttcctgttcccccccaagcctaaggacaccctgatgatcagcagaacccccgaggtgacctgcgtggtggtggatgtgagccacgaggaccctgaggtgaagttcaactggtacgtggacggcgtggaggtgcacaatgccaagaccaagcccagggaggagcagtacaacagcacctaccgggtggtgtccgtgctgaccgtgctgcaccaggattggctgaacggcaaggagtacaagtgcaaggtgtccaacaaggccctgcctgcccctatcgagaaaaccatcagcaaggccaagggccagcccagagagccccaggtgtacaccctgccccctagcagagatgagctgaccaagaaccaggtgtccctgacctgcctggtgaagggcttctaccccagcgacatcgccgtggagtgggagagcaacggccagcccgagaacaactacaagaccaccccccctgtgctggacagcgatggcagcttcttcctgtacagcaagctgaccgtggacaagagcagatggcagcagggcaacgtgttcagctgcagcgtgatgcacgaggccctgcacaatcactacacccagaagagcctgagcctgtcccctggcaagtga

SEQ ID NO: 612 - DNA, 1026 bp, Artificial Sequence
  Synthetic
gacatccagatgacccagagccccagcagcctgagcgcctctgtgggcgatagagtgaccatcacctgcagagccagccaggccatcgacagctacctgcactggtatcagcagaagcctggcaaggcccctaagctgctgatctacagcgccagcaatctggagaccggcgtgcctagcagattcagcggcagcggctccggcaccgacttcaccctgaccatcagcagcctgctgcctgaggatttcgccacctactactgccagcaggtggtgtggagacctttcaccttcggccagggcaccaagcacgagatcaagcgggtggagcccaagagcagcgataagacccacacctgccccccctgccctgcccccgagctgctgggcggacccagcgtgttcctgttcccccccaagcctaaggacaccctgatgatcagcagaacccccgaggtgacctgcgtggtggtggatgtgagccacgaggaccctgaggtgaagttcaactggtacgtggacggcgtggaggtgcacaatgccaagaccaagcccagggaggagcagtacaacagcacctaccgggtggtgtccgtgctgaccgtgctgcaccaggattggctgaacggcaaggagtacaagtgcaaggtgtccaacaaggccctgcctgcccctatcgagaaaaccatcagcaaggccaagggccagcccagagagccccaggtgtacaccctgccccctagcagagatgagctgaccaagaaccaggtgtccctgacctgcctggtgaagggcttctaccccagcgacatcgccgtggagtgggagagcaacggccagcccgagaacaactacaagaccaccccccctgtgctggacagcgatggcagcttcttcctgtacagcaagctgaccgtggacaagagcagatggcagcagggcaacgtgttcagctgcagcgtgatgcacgaggccctgcacaatcactacacccagaagagcctgagcctgtcccctggcaagtga

SEQ ID NO: 613 - DNA, 1026 bp, Artificial Sequence
  Synthetic
gacatccagatgacccagagccccagcagcctgagcgcctctgtgggcgatagagtgaccatcacctgcagagccagccaggccatcgacagctacctgcactggtatcagcagaagcctggcaaggcccctaagctgctgatctacagcgccagcaatctggagaccggcgtgcctagcagattcagcggcagcggctccggcaccgacttcaccctgaccatcagcagcctgctgcctgaggatttcgccacctactactgccagcaggtggtgtggagacctttcaccttcggccagggcaccaagcccgagatcaagcgggtggagcccaagagcagcgataagacccacacctgccccccctgccctgcccccgagctgctgggcggacccagcgtgttcctgttcccccccaagcctaaggacaccctgatgatcagcagaacccccgaggtgacctgcgtggtggtggatgtgagccacgaggaccctgaggtgaagttcaactggtacgtggacggcgtggaggtgcacaatgccaagaccaagcccagggaggagcagtacaacagcacctaccgggtggtgtccgtgctgaccgtgctgcaccaggattggctgaacggcaaggagtacaagtgcaaggtgtccaacaaggccctgcctgcccctatcgagaaaaccatcagcaaggccaagggccagcccagagagccccaggtgtacaccctgccccctagcagagatgagctgaccaagaaccaggtgtccctgacctgcctggtgaagggcttctaccccagcgacatcgccgtggagtgggagagcaacggccagcccgagaacaactacaagaccaccccccctgtgctggacagcgatggcagcttcttcctgtacagcaagctgaccgtggacaagagcagatggcagcagggcaacgtgttcagctgcagcgtgatgcacgaggccctgcacaatcactacacccagaagagcctgagcctgtcccctggcaagtga

SEQ ID NO: 614 - DNA, 1026 bp, Artificial Sequence
  Synthetic
gacatccagatgacccagagccccagcagcctgagcgcctctgtgggcgatagagtgaccatcacctgcagagccagccaggccatcgacagctacctgcactggtatcagcagaagcctggcaaggcccctaagctgctgatctacagcgccagcaatctggagaccggcgtgcctagcagattcagcggcagcggctccggcaccgacttcaccctgaccatcagcagcctgctgcctgaggatttcgccacctactactgccagcaggtggtgtggagacctttcaccttcggccagggcaccaagaaggagatcaagcgggtggagcccaagagcagcgataagacccacacctgccccccctgccctgcccccgagctgctgggcggacccagcgtgttcctgttcccccccaagcctaaggacaccctgatgatcagcagaacccccgaggtgacctgcgtggtggtggatgtgagccacgaggaccctgaggtgaagttcaactggtacgtggacggcgtggaggtgcacaatgccaagaccaagcccagggaggagcagtacaacagcacctaccgggtggtgtccgtgctgaccgtgctgcaccaggattggctgaacggcaaggagtacaagtgcaaggtgtccaacaaggccctgcctgcccctatcgagaaaaccatcagcaaggccaagggccagcccagagagccccaggtgtacaccctgccccctagcagagatgagctgaccaagaaccaggtgtccctgacctgcctggtgaagggcttctaccccagcgacatcgccgtggagtgggagagcaacggccagcccgagaacaactacaagaccaccccccctgtgctggacagcgatggcagcttcttcctgtacagcaagctgaccgtggacaagagcagatggcagcagggcaacgtgttcagctgcagcgtgatgcacgaggccctgcacaatcactacacccagaagagcctgagcctgtcccctggcaagtga

SEQ ID NO: 615 - DNA, 1026 bp, Artificial Sequence
  Synthetic
gacatccagatgacccagagccccagcagcctgagcgcctctgtgggcgatagagtgaccatcacctgcagagccagccaggccatcgacagctacctgcactggtatcagcagaagcctggcaaggcccctaagctgctgatctacagcgccagcaatctggagaccggcgtgcctagcagattcagcggcagcggctccggcaccgacttcaccctgaccatcagcagcctgctgcctgaggatttcgccacctactactgccagcaggtggtgtggagacctttcaccttcggccagggcaccaaggtgagcatcaagcgggtggagcccaagagcagcgataagacccacacctgccccccctgccctgcccccgagctgctgggcggacccagcgtgttcctgttcccccccaagcctaaggacaccctgatgatcagcagaacccccgaggtgacctgcgtggtggtggatgtgagccacgaggaccctgaggtgaagttcaactggtacgtggacggcgtggaggtgcacaatgccaagaccaagcccagggaggagcagtacaacagcacctaccgggtggtgtccgtgctgaccgtgctgcaccaggattggctgaacggcaaggagtacaagtgcaaggtgtccaacaaggccctgcctgcccctatcgagaaaaccatcagcaaggccaagggccagcccagagagccccaggtgtacaccctgccccctagcagagatgagctgaccaagaaccaggtgtccctgacctgcctggtgaagggcttctaccccagcgacatcgccgtggagtgggagagcaacggccagcccgagaacaactacaagaccaccccccctgtgctggacagcgatggcagcttcttcctgtacagcaagctgaccgtggacaagagcagatggcagcagggcaacgtgttcagctgcagcgtgatgcacgaggccctgcacaatcactacacccagaagagcctgagcctgtcccctggcaagtga

SEQ ID NO: 616 - DNA, 1026 bp, Artificial Sequence
  Synthetic
gacatccagatgacccagagccccagcagcctgagcgcctctgtgggcgatagagtgaccatcacctgcagagccagccaggccatcgacagctacctgcactggtatcagcagaagcctggcaaggcccctaagctgctgatctacagcgccagcaatctggagaccggcgtgcctagcagattcagcggcagcggctccggcaccgacttcaccctgaccatcagcagcctgctgcctgaggatttcgccacctactactgccagcaggtggtgtggagacctttcaccttcggccagggcaccaaggtgctgatcaagcgggtggagcccaagagcagcgataagacccacacctgccccccctgccctgcccccgagctgctgggcggacccagcgtgttcctgttcccccccaagcctaaggacaccctgatgatcagcagaacccccgaggtgacctgcgtggtggtggatgtgagccacgaggaccctgaggtgaagttcaactggtacgtggacggcgtggaggtgcacaatgccaagaccaagcccagggaggagcagtacaacagcacctaccgggtggtgtccgtgctgaccgtgctgcaccaggattggctgaacggcaaggagtacaagtgcaaggtgtccaacaaggccctgcctgcccctatcgagaaaaccatcagcaaggccaagggccagcccagagagccccaggtgtacaccctgccccctagcagagatgagctgaccaagaaccaggtgtccctgacctgcctggtgaagggcttctaccccagcgacatcgccgtggagtgggagagcaacggccagcccgagaacaactacaagaccaccccccctgtgctggacagcgatggcagcttcttcctgtacagcaagctgaccgtggacaagagcagatggcagcagggcaacgtgttcagctgcagcgtgatgcacgaggccctgcacaatcactacacccagaagagcctgagcctgtcccctggcaagtga

SEQ ID NO: 617 - DNA, 1026 bp, Artificial Sequence
  Synthetic
gacatccagatgacccagagccccagcagcctgagcgcctctgtgggcgatagagtgaccatcacctgcagagccagccaggccatcgacagctacctgcactggtatcagcagaagcctggcaaggcccctaagctgctgatctacagcgccagcaatctggagaccggcgtgcctagcagattcagcggcagcggctccggcaccgacttcaccctgaccatcagcagcctgctgcctgaggatttcgccacctactactgccagcaggtggtgtggagacctttcaccttcggccagggcaccaaggtgtacatcaagcgggtggagcccaagagcagcgataagacccacacctgccccccctgccctgcccccgagctgctgggcggacccagcgtgttcctgttcccccccaagcctaaggacaccctgatgatcagcagaacccccgaggtgacctgcgtggtggtggatgtgagccacgaggaccctgaggtgaagttcaactggtacgtggacggcgtggaggtgcacaatgccaagaccaagcccagggaggagcagtacaacagcacctaccgggtggtgtccgtgctgaccgtgctgcaccaggattggctgaacggcaaggagtacaagtgcaaggtgtccaacaaggccctgcctgcccctatcgagaaaaccatcagcaaggccaagggccagcccagagagccccaggtgtacaccctgccccctagcagagatgagctgaccaagaaccaggtgtccctgacctgcctggtgaagggcttctaccccagcgacatcgccgtggagtgggagagcaacggccagcccgagaacaactacaagaccaccccccctgtgctggacagcgatggcagcttcttcctgtacagcaagctgaccgtggacaagagcagatggcagcagggcaacgtgttcagctgcagcgtgatgcacgaggccctgcacaatcactacacccagaagagcctgagcctgtcccctggcaagtga

SEQ ID NO: 618 - DNA, 1026 bp, Artificial Sequence
  Synthetic
gacatccagatgacccagagccccagcagcctgagcgcctctgtgggcgatagagtgaccatcacctgcagagccagccaggccatcgacagctacctgcactggtatcagcagaagcctggcaaggcccctaagctgctgatctacagcgccagcaatctggagaccggcgtgcctagcagattcagcggcagcggctccggcaccgacttcaccctgaccatcagcagcctgctgcctgaggatttcgccacctactactgccagcaggtggtgtggagacctttcaccttcggccagggcaccaaggtggacatcaagcgggtggagcccaagagcagcgataagacccacacctgccccccctgccctgcccccgagctgctgggcggacccagcgtgttcctgttcccccccaagcctaaggacaccctgatgatcagcagaacccccgaggtgacctgcgtggtggtggatgtgagccacgaggaccctgaggtgaagttcaactggtacgtggacggcgtggaggtgcacaatgccaagaccaagcccagggaggagcagtacaacagcacctaccgggtggtgtccgtgctgaccgtgctgcaccaggattggctgaacggcaaggagtacaagtgcaaggtgtccaacaaggccctgcctgcccctatcgagaaaaccatcagcaaggccaagggccagcccagagagccccaggtgtacaccctgccccctagcagagatgagctgaccaagaaccaggtgtccctgacctgcctggtgaagggcttctaccccagcgacatcgccgtggagtgggagagcaacggccagcccgagaacaactacaagaccaccccccctgtgctggacagcgatggcagcttcttcctgtacagcaagctgaccgtggacaagagcagatggcagcagggcaacgtgttcagctgcagcgtgatgcacgaggccctgcacaatcactacacccagaagagcctgagcctgtcccctggcaagtga

SEQ ID NO: 619 - DNA, 1026 bp, Artificial Sequence
  Synthetic
gacatccagatgacccagagccccagcagcctgagcgcctctgtgggcgatagagtgaccatcacctgcagagccagccaggccatcgacagctacctgcactggtatcagcagaagcctggcaaggcccctaagctgctgatctacagcgccagcaatctggagaccggcgtgcctagcagattcagcggcagcggctccggcaccgacttcaccctgaccatcagcagcctgctgcctgaggatttcgccacctactactgccagcaggtggtgtggagacctttcaccttcggccagggcaccaaggtgcagatcaagcgggtggagcccaagagcagcgataagacccacacctgccccccctgccctgcccccgagctgctgggcggacccagcgtgttcctgttcccccccaagcctaaggacaccctgatgatcagcagaacccccgaggtgacctgcgtggtggtggatgtgagccacgaggaccctgaggtgaagttcaactggtacgtggacggcgtggaggtgcacaatgccaagaccaagcccagggaggagcagtacaacagcacctaccgggtggtgtccgtgctgaccgtgctgcaccaggattggctgaacggcaaggagtacaagtgcaaggtgtccaacaaggccctgcctgcccctatcgagaaaaccatcagcaaggccaagggccagcccagagagccccaggtgtacaccctgccccctagcagagatgagctgaccaagaaccaggtgtccctgacctgcctggtgaagggcttctaccccagcgacatcgccgtggagtgggagagcaacggccagcccgagaacaactacaagaccaccccccctgtgctggacagcgatggcagcttcttcctgtacagcaagctgaccgtggacaagagcagatggcagcagggcaacgtgttcagctgcagcgtgatgcacgaggccctgcacaatcactacacccagaagagcctgagcctgtcccctggcaagtga

SEQ ID NO: 620 - DNA, 1026 bp, Artificial Sequence
  Synthetic
gacatccagatgacccagagccccagcagcctgagcgcctctgtgggcgatagagtgaccatcacctgcagagccagccaggccatcgacagctacctgcactggtatcagcagaagcctggcaaggcccctaagctgctgatctacagcgccagcaatctggagaccggcgtgcctagcagattcagcggcagcggctccggcaccgacttcaccctgaccatcagcagcctgctgcctgaggatttcgccacctactactgccagcaggtggtgtggagacctttcaccttcggccagggcaccaaggtgcacatcaagcgggtggagcccaagagcagcgataagacccacacctgccccccctgccctgcccccgagctgctgggcggacccagcgtgttcctgttcccccccaagcctaaggacaccctgatgatcagcagaacccccgaggtgacctgcgtggtggtggatgtgagccacgaggaccctgaggtgaagttcaactggtacgtggacggcgtggaggtgcacaatgccaagaccaagcccagggaggagcagtacaacagcacctaccgggtggtgtccgtgctgaccgtgctgcaccaggattggctgaacggcaaggagtacaagtgcaaggtgtccaacaaggccctgcctgcccctatcgagaaaaccatcagcaaggccaagggccagcccagagagccccaggtgtacaccctgccccctagcagagatgagctgaccaagaaccaggtgtccctgacctgcctggtgaagggcttctaccccagcgacatcgccgtggagtgggagagcaacggccagcccgagaacaactacaagaccaccccccctgtgctggacagcgatggcagcttcttcctgtacagcaagctgaccgtggacaagagcagatggcagcagggcaacgtgttcagctgcagcgtgatgcacgaggccctgcacaatcactacacccagaagagcctgagcctgtcccctggcaagtga

SEQ ID NO: 621 - DNA, 1026 bp, Artificial Sequence
  Synthetic
gacatccagatgacccagagccccagcagcctgagcgcctctgtgggcgatagagtgaccatcacctgcagagccagccaggccatcgacagctacctgcactggtatcagcagaagcctggcaaggcccctaagctgctgatctacagcgccagcaatctggagaccggcgtgcctagcagattcagcggcagcggctccggcaccgacttcaccctgaccatcagcagcctgctgcctgaggatttcgccacctactactgccagcaggtggtgtggagacctttcaccttcggccagggcaccaaggtgcccatcaagcgggtggagcccaagagcagcgataagacccacacctgccccccctgccctgcccccgagctgctgggcggacccagcgtgttcctgttcccccccaagcctaaggacaccctgatgatcagcagaacccccgaggtgacctgcgtggtggtggatgtgagccacgaggaccctgaggtgaagttcaactggtacgtggacggcgtggaggtgcacaatgccaagaccaagcccagggaggagcagtacaacagcacctaccgggtggtgtccgtgctgaccgtgctgcaccaggattggctgaacggcaaggagtacaagtgcaaggtgtccaacaaggccctgcctgcccctatcgagaaaaccatcagcaaggccaagggccagcccagagagccccaggtgtacaccctgccccctagcagagatgagctgaccaagaaccaggtgtccctgacctgcctggtgaagggcttctaccccagcgacatcgccgtggagtgggagagcaacggccagcccgagaacaactacaagaccaccccccctgtgctggacagcgatggcagcttcttcctgtacagcaagctgaccgtggacaagagcagatggcagcagggcaacgtgttcagctgcagcgtgatgcacgaggccctgcacaatcactacacccagaagagcctgagcctgtcccctggcaagtga

SEQ ID NO: 622 - DNA, 1026 bp, Artificial Sequence
  Synthetic
gacatccagatgacccagagccccagcagcctgagcgcctctgtgggcgatagagtgaccatcacctgcagagccagccaggccatcgacagctacctgcactggtatcagcagaagcctggcaaggcccctaagctgctgatctacagcgccagcaatctggagaccggcgtgcctagcagattcagcggcagcggctccggcaccgacttcaccctgaccatcagcagcctgctgcctgaggatttcgccacctactactgccagcaggtggtgtggagacctttcaccttcggccagggcaccaaggtgaagatcaagcgggtggagcccaagagcagcgataagacccacacctgccccccctgccctgcccccgagctgctgggcggacccagcgtgttcctgttcccccccaagcctaaggacaccctgatgatcagcagaacccccgaggtgacctgcgtggtggtggatgtgagccacgaggaccctgaggtgaagttcaactggtacgtggacggcgtggaggtgcacaatgccaagaccaagcccagggaggagcagtacaacagcacctaccgggtggtgtccgtgctgaccgtgctgcaccaggattggctgaacggcaaggagtacaagtgcaaggtgtccaacaaggccctgcctgcccctatcgagaaaaccatcagcaaggccaagggccagcccagagagccccaggtgtacaccctgccccctagcagagatgagctgaccaagaaccaggtgtccctgacctgcctggtgaagggcttctaccccagcgacatcgccgtggagtgggagagcaacggccagcccgagaacaactacaagaccaccccccctgtgctggacagcgatggcagcttcttcctgtacagcaagctgaccgtggacaagagcagatggcagcagggcaacgtgttcagctgcagcgtgatgcacgaggccctgcacaatcactacacccagaagagcctgagcctgtcccctggcaagtga

SEQ ID NO: 623 - DNA, 1026 bp, Artificial Sequence
  Synthetic
gacatccagatgacccagagccccagcagcctgagcgcctctgtgggcgatagagtgaccatcacctgcagagccagccaggccatcgacagctacctgcactggtatcagcagaagcctggcaaggcccctaagctgctgatctacagcgccagcaatctggagaccggcgtgcctagcagattcagcggcagcggctccggcaccgacttcaccctgaccatcagcagcctgctgcctgaggatttcgccacctactactgccagcaggtggtgtggagacctttcaccttcggccagggcaccaaggtggagagcaagcgggtggagcccaagagcagcgataagacccacacctgccccccctgccctgcccccgagctgctgggcggacccagcgtgttcctgttcccccccaagcctaaggacaccctgatgatcagcagaacccccgaggtgacctgcgtggtggtggatgtgagccacgaggaccctgaggtgaagttcaactggtacgtggacggcgtggaggtgcacaatgccaagaccaagcccagggaggagcagtacaacagcacctaccgggtggtgtccgtgctgaccgtgctgcaccaggattggctgaacggcaaggagtacaagtgcaaggtgtccaacaaggccctgcctgcccctatcgagaaaaccatcagcaaggccaagggccagcccagagagccccaggtgtacaccctgccccctagcagagatgagctgaccaagaaccaggtgtccctgacctgcctggtgaagggcttctaccccagcgacatcgccgtggagtgggagagcaacggccagcccgagaacaactacaagaccaccccccctgtgctggacagcgatggcagcttcttcctgtacagcaagctgaccgtggacaagagcagatggcagcagggcaacgtgttcagctgcagcgtgatgcacgaggccctgcacaatcactacacccagaagagcctgagcctgtcccctggcaagtga

SEQ ID NO: 624 - DNA, 1026 bp, Artificial Sequence
  Synthetic
gacatccagatgacccagagccccagcagcctgagcgcctctgtgggcgatagagtgaccatcacctgcagagccagccaggccatcgacagctacctgcactggtatcagcagaagcctggcaaggcccctaagctgctgatctacagcgccagcaatctggagaccggcgtgcctagcagattcagcggcagcggctccggcaccgacttcaccctgaccatcagcagcctgctgcctgaggatttcgccacctactactgccagcaggtggtgtggagacctttcaccttcggccagggcaccaaggtggagctgaagcgggtggagcccaagagcagcgataagacccacacctgccccccctgccctgcccccgagctgctgggcggacccagcgtgttcctgttcccccccaagcctaaggacaccctgatgatcagcagaacccccgaggtgacctgcgtggtggtggatgtgagccacgaggaccctgaggtgaagttcaactggtacgtggacggcgtggaggtgcacaatgccaagaccaagcccagggaggagcagtacaacagcacctaccgggtggtgtccgtgctgaccgtgctgcaccaggattggctgaacggcaaggagtacaagtgcaaggtgtccaacaaggccctgcctgcccctatcgagaaaaccatcagcaaggccaagggccagcccagagagccccaggtgtacaccctgccccctagcagagatgagctgaccaagaaccaggtgtccctgacctgcctggtgaagggcttctaccccagcgacatcgccgtggagtgggagagcaacggccagcccgagaacaactacaagaccaccccccctgtgctggacagcgatggcagcttcttcctgtacagcaagctgaccgtggacaagagcagatggcagcagggcaacgtgttcagctgcagcgtgatgcacgaggccctgcacaatcactacacccagaagagcctgagcctgtcccctggcaagtga

SEQ ID NO: 625 - DNA, 1026 bp, Artificial Sequence
  Synthetic
gacatccagatgacccagagccccagcagcctgagcgcctctgtgggcgatagagtgaccatcacctgcagagccagccaggccatcgacagctacctgcactggtatcagcagaagcctggcaaggcccctaagctgctgatctacagcgccagcaatctggagaccggcgtgcctagcagattcagcggcagcggctccggcaccgacttcaccctgaccatcagcagcctgctgcctgaggatttcgccacctactactgccagcaggtggtgtggagacctttcaccttcggccagggcaccaaggtggagtacaagcgggtggagcccaagagcagcgataagacccacacctgccccccctgccctgcccccgagctgctgggcggacccagcgtgttcctgttcccccccaagcctaaggacaccctgatgatcagcagaacccccgaggtgacctgcgtggtggtggatgtgagccacgaggaccctgaggtgaagttcaactggtacgtggacggcgtggaggtgcacaatgccaagaccaagcccagggaggagcagtacaacagcacctaccgggtggtgtccgtgctgaccgtgctgcaccaggattggctgaacggcaaggagtacaagtgcaaggtgtccaacaaggccctgcctgcccctatcgagaaaaccatcagcaaggccaagggccagcccagagagccccaggtgtacaccctgccccctagcagagatgagctgaccaagaaccaggtgtccctgacctgcctggtgaagggcttctaccccagcgacatcgccgtggagtgggagagcaacggccagcccgagaacaactacaagaccaccccccctgtgctggacagcgatggcagcttcttcctgtacagcaagctgaccgtggacaagagcagatggcagcagggcaacgtgttcagctgcagcgtgatgcacgaggccctgcacaatcactacacccagaagagcctgagcctgtcccctggcaagtga

SEQ ID NO: 626 - DNA, 1026 bp, Artificial Sequence
  Synthetic
gacatccagatgacccagagccccagcagcctgagcgcctctgtgggcgatagagtgaccatcacctgcagagccagccaggccatcgacagctacctgcactggtatcagcagaagcctggcaaggcccctaagctgctgatctacagcgccagcaatctggagaccggcgtgcctagcagattcagcggcagcggctccggcaccgacttcaccctgaccatcagcagcctgctgcctgaggatttcgccacctactactgccagcaggtggtgtggagacctttcaccttcggccagggcaccaaggtggaggacaagcgggtggagcccaagagcagcgataagacccacacctgccccccctgccctgcccccgagctgctgggcggacccagcgtgttcctgttcccccccaagcctaaggacaccctgatgatcagcagaacccccgaggtgacctgcgtggtggtggatgtgagccacgaggaccctgaggtgaagttcaactggtacgtggacggcgtggaggtgcacaatgccaagaccaagcccagggaggagcagtacaacagcacctaccgggtggtgtccgtgctgaccgtgctgcaccaggattggctgaacggcaaggagtacaagtgcaaggtgtccaacaaggccctgcctgcccctatcgagaaaaccatcagcaaggccaagggccagcccagagagccccaggtgtacaccctgccccctagcagagatgagctgaccaagaaccaggtgtccctgacctgcctggtgaagggcttctaccccagcgacatcgccgtggagtgggagagcaacggccagcccgagaacaactacaagaccaccccccctgtgctggacagcgatggcagcttcttcctgtacagcaagctgaccgtggacaagagcagatggcagcagggcaacgtgttcagctgcagcgtgatgcacgaggccctgcacaatcactacacccagaagagcctgagcctgtcccctggcaagtga

SEQ ID NO: 627 - DNA, 1026 bp, Artificial Sequence
  Synthetic
gacatccagatgacccagagccccagcagcctgagcgcctctgtgggcgatagagtgaccatcacctgcagagccagccaggccatcgacagctacctgcactggtatcagcagaagcctggcaaggcccctaagctgctgatctacagcgccagcaatctggagaccggcgtgcctagcagattcagcggcagcggctccggcaccgacttcaccctgaccatcagcagcctgctgcctgaggatttcgccacctactactgccagcaggtggtgtggagacctttcaccttcggccagggcaccaaggtggagcagaagcgggtggagcccaagagcagcgataagacccacacctgccccccctgccctgcccccgagctgctgggcggacccagcgtgttcctgttcccccccaagcctaaggacaccctgatgatcagcagaacccccgaggtgacctgcgtggtggtggatgtgagccacgaggaccctgaggtgaagttcaactggtacgtggacggcgtggaggtgcacaatgccaagaccaagcccagggaggagcagtacaacagcacctaccgggtggtgtccgtgctgaccgtgctgcaccaggattggctgaacggcaaggagtacaagtgcaaggtgtccaacaaggccctgcctgcccctatcgagaaaaccatcagcaaggccaagggccagcccagagagccccaggtgtacaccctgccccctagcagagatgagctgaccaagaaccaggtgtccctgacctgcctggtgaagggcttctaccccagcgacatcgccgtggagtgggagagcaacggccagcccgagaacaactacaagaccaccccccctgtgctggacagcgatggcagcttcttcctgtacagcaagctgaccgtggacaagagcagatggcagcagggcaacgtgttcagctgcagcgtgatgcacgaggccctgcacaatcactacacccagaagagcctgagcctgtcccctggcaagtga

SEQ ID NO: 628 - DNA, 1026 bp, Artificial Sequence
  Synthetic
gacatccagatgacccagagccccagcagcctgagcgcctctgtgggcgatagagtgaccatcacctgcagagccagccaggccatcgacagctacctgcactggtatcagcagaagcctggcaaggcccctaagctgctgatctacagcgccagcaatctggagaccggcgtgcctagcagattcagcggcagcggctccggcaccgacttcaccctgaccatcagcagcctgctgcctgaggatttcgccacctactactgccagcaggtggtgtggagacctttcaccttcggccagggcaccaaggtggagcacaagcgggtggagcccaagagcagcgataagacccacacctgccccccctgccctgcccccgagctgctgggcggacccagcgtgttcctgttcccccccaagcctaaggacaccctgatgatcagcagaacccccgaggtgacctgcgtggtggtggatgtgagccacgaggaccctgaggtgaagttcaactggtacgtggacggcgtggaggtgcacaatgccaagaccaagcccagggaggagcagtacaacagcacctaccgggtggtgtccgtgctgaccgtgctgcaccaggattggctgaacggcaaggagtacaagtgcaaggtgtccaacaaggccctgcctgcccctatcgagaaaaccatcagcaaggccaagggccagcccagagagccccaggtgtacaccctgccccctagcagagatgagctgaccaagaaccaggtgtccctgacctgcctggtgaagggcttctaccccagcgacatcgccgtggagtgggagagcaacggccagcccgagaacaactacaagaccaccccccctgtgctggacagcgatggcagcttcttcctgtacagcaagctgaccgtggacaagagcagatggcagcagggcaacgtgttcagctgcagcgtgatgcacgaggccctgcacaatcactacacccagaagagcctgagcctgtcccctggcaagtga

SEQ ID NO: 629 - DNA, 1026 bp, Artificial Sequence
  Synthetic
gacatccagatgacccagagccccagcagcctgagcgcctctgtgggcgatagagtgaccatcacctgcagagccagccaggccatcgacagctacctgcactggtatcagcagaagcctggcaaggcccctaagctgctgatctacagcgccagcaatctggagaccggcgtgcctagcagattcagcggcagcggctccggcaccgacttcaccctgaccatcagcagcctgctgcctgaggatttcgccacctactactgccagcaggtggtgtggagacctttcaccttcggccagggcaccaaggtggagcccaagcgggtggagcccaagagcagcgataagacccacacctgccccccctgccctgcccccgagctgctgggcggacccagcgtgttcctgttcccccccaagcctaaggacaccctgatgatcagcagaacccccgaggtgacctgcgtggtggtggatgtgagccacgaggaccctgaggtgaagttcaactggtacgtggacggcgtggaggtgcacaatgccaagaccaagcccagggaggagcagtacaacagcacctaccgggtggtgtccgtgctgaccgtgctgcaccaggattggctgaacggcaaggagtacaagtgcaaggtgtccaacaaggccctgcctgcccctatcgagaaaaccatcagcaaggccaagggccagcccagagagccccaggtgtacaccctgccccctagcagagatgagctgaccaagaaccaggtgtccctgacctgcctggtgaagggcttctaccccagcgacatcgccgtggagtgggagagcaacggccagcccgagaacaactacaagaccaccccccctgtgctggacagcgatggcagcttcttcctgtacagcaagctgaccgtggacaagagcagatggcagcagggcaacgtgttcagctgcagcgtgatgcacgaggccctgcacaatcactacacccagaagagcctgagcctgtcccctggcaagtga

SEQ ID NO: 630 - DNA, 1026 bp, Artificial Sequence
  Synthetic
gacatccagatgacccagagccccagcagcctgagcgcctctgtgggcgatagagtgaccatcacctgcagagccagccaggccatcgacagctacctgcactggtatcagcagaagcctggcaaggcccctaagctgctgatctacagcgccagcaatctggagaccggcgtgcctagcagattcagcggcagcggctccggcaccgacttcaccctgaccatcagcagcctgctgcctgaggatttcgccacctactactgccagcaggtggtgtggagacctttcaccttcggccagggcaccaaggtggagaagaagcgggtggagcccaagagcagcgataagacccacacctgccccccctgccctgcccccgagctgctgggcggacccagcgtgttcctgttcccccccaagcctaaggacaccctgatgatcagcagaacccccgaggtgacctgcgtggtggtggatgtgagccacgaggaccctgaggtgaagttcaactggtacgtggacggcgtggaggtgcacaatgccaagaccaagcccagggaggagcagtacaacagcacctaccgggtggtgtccgtgctgaccgtgctgcaccaggattggctgaacggcaaggagtacaagtgcaaggtgtccaacaaggccctgcctgcccctatcgagaaaaccatcagcaaggccaagggccagcccagagagccccaggtgtacaccctgccccctagcagagatgagctgaccaagaaccaggtgtccctgacctgcctggtgaagggcttctaccccagcgacatcgccgtggagtgggagagcaacggccagcccgagaacaactacaagaccaccccccctgtgctggacagcgatggcagcttcttcctgtacagcaagctgaccgtggacaagagcagatggcagcagggcaacgtgttcagctgcagcgtgatgcacgaggccctgcacaatcactacacccagaagagcctgagcctgtcccctggcaagtga

SEQ ID NO: 631 - DNA, 1026 bp, Artificial Sequence
  Synthetic
gacatccagatgacccagagccccagcagcctgagcgcctctgtgggcgatagagtgaccatcacctgcagagccagccaggccatcgacagctacctgcactggtatcagcagaagcctggcaaggcccctaagctgctgatctacagcgccagcaatctggagaccggcgtgcctagcagattcagcggcagcggctccggcaccgacttcaccctgaccatcagcagcctgctgcctgaggatttcgccacctactactgccagcaggtggtgtggagacctttcaccttcggccagggcaccaaggtggagatcagccgggtggagcccaagagcagcgataagacccacacctgccccccctgccctgcccccgagctgctgggcggacccagcgtgttcctgttcccccccaagcctaaggacaccctgatgatcagcagaacccccgaggtgacctgcgtggtggtggatgtgagccacgaggaccctgaggtgaagttcaactggtacgtggacggcgtggaggtgcacaatgccaagaccaagcccagggaggagcagtacaacagcacctaccgggtggtgtccgtgctgaccgtgctgcaccaggattggctgaacggcaaggagtacaagtgcaaggtgtccaacaaggccctgcctgcccctatcgagaaaaccatcagcaaggccaagggccagcccagagagccccaggtgtacaccctgccccctagcagagatgagctgaccaagaaccaggtgtccctgacctgcctggtgaagggcttctaccccagcgacatcgccgtggagtgggagagcaacggccagcccgagaacaactacaagaccaccccccctgtgctggacagcgatggcagcttcttcctgtacagcaagctgaccgtggacaagagcagatggcagcagggcaacgtgttcagctgcagcgtgatgcacgaggccctgcacaatcactacacccagaagagcctgagcctgtcccctggcaagtga

SEQ ID NO: 632 - DNA, 1026 bp, Artificial Sequence
  Synthetic
gacatccagatgacccagagccccagcagcctgagcgcctctgtgggcgatagagtgaccatcacctgcagagccagccaggccatcgacagctacctgcactggtatcagcagaagcctggcaaggcccctaagctgctgatctacagcgccagcaatctggagaccggcgtgcctagcagattcagcggcagcggctccggcaccgacttcaccctgaccatcagcagcctgctgcctgaggatttcgccacctactactgccagcaggtggtgtggagacctttcaccttcggccagggcaccaaggtggagatcctgcgggtggagcccaagagcagcgataagacccacacctgccccccctgccctgcccccgagctgctgggcggacccagcgtgttcctgttcccccccaagcctaaggacaccctgatgatcagcagaacccccgaggtgacctgcgtggtggtggatgtgagccacgaggaccctgaggtgaagttcaactggtacgtggacggcgtggaggtgcacaatgccaagaccaagcccagggaggagcagtacaacagcacctaccgggtggtgtccgtgctgaccgtgctgcaccaggattggctgaacggcaaggagtacaagtgcaaggtgtccaacaaggccctgcctgcccctatcgagaaaaccatcagcaaggccaagggccagcccagagagccccaggtgtacaccctgccccctagcagagatgagctgaccaagaaccaggtgtccctgacctgcctggtgaagggcttctaccccagcgacatcgccgtggagtgggagagcaacggccagcccgagaacaactacaagaccaccccccctgtgctggacagcgatggcagcttcttcctgtacagcaagctgaccgtggacaagagcagatggcagcagggcaacgtgttcagctgcagcgtgatgcacgaggccctgcacaatcactacacccagaagagcctgagcctgtcccctggcaagtga

SEQ ID NO: 633 - DNA, 1026 bp, Artificial Sequence
  Synthetic
gacatccagatgacccagagccccagcagcctgagcgcctctgtgggcgatagagtgaccatcacctgcagagccagccaggccatcgacagctacctgcactggtatcagcagaagcctggcaaggcccctaagctgctgatctacagcgccagcaatctggagaccggcgtgcctagcagattcagcggcagcggctccggcaccgacttcaccctgaccatcagcagcctgctgcctgaggatttcgccacctactactgccagcaggtggtgtggagacctttcaccttcggccagggcaccaaggtggagatctaccgggtggagcccaagagcagcgataagacccacacctgccccccctgccctgcccccgagctgctgggcggacccagcgtgttcctgttcccccccaagcctaaggacaccctgatgatcagcagaacccccgaggtgacctgcgtggtggtggatgtgagccacgaggaccctgaggtgaagttcaactggtacgtggacggcgtggaggtgcacaatgccaagaccaagcccagggaggagcagtacaacagcacctaccgggtggtgtccgtgctgaccgtgctgcaccaggattggctgaacggcaaggagtacaagtgcaaggtgtccaacaaggccctgcctgcccctatcgagaaaaccatcagcaaggccaagggccagcccagagagccccaggtgtacaccctgccccctagcagagatgagctgaccaagaaccaggtgtccctgacctgcctggtgaagggcttctaccccagcgacatcgccgtggagtgggagagcaacggccagcccgagaacaactacaagaccaccccccctgtgctggacagcgatggcagcttcttcctgtacagcaagctgaccgtggacaagagcagatggcagcagggcaacgtgttcagctgcagcgtgatgcacgaggccctgcacaatcactacacccagaagagcctgagcctgtcccctggcaagtga

SEQ ID NO: 634 - DNA, 1026 bp, Artificial Sequence
  Synthetic
gacatccagatgacccagagccccagcagcctgagcgcctctgtgggcgatagagtgaccatcacctgcagagccagccaggccatcgacagctacctgcactggtatcagcagaagcctggcaaggcccctaagctgctgatctacagcgccagcaatctggagaccggcgtgcctagcagattcagcggcagcggctccggcaccgacttcaccctgaccatcagcagcctgctgcctgaggatttcgccacctactactgccagcaggtggtgtggagacctttcaccttcggccagggcaccaaggtggagatcgaccgggtggagcccaagagcagcgataagacccacacctgccccccctgccctgcccccgagctgctgggcggacccagcgtgttcctgttcccccccaagcctaaggacaccctgatgatcagcagaacccccgaggtgacctgcgtggtggtggatgtgagccacgaggaccctgaggtgaagttcaactggtacgtggacggcgtggaggtgcacaatgccaagaccaagcccagggaggagcagtacaacagcacctaccgggtggtgtccgtgctgaccgtgctgcaccaggattggctgaacggcaaggagtacaagtgcaaggtgtccaacaaggccctgcctgcccctatcgagaaaaccatcagcaaggccaagggccagcccagagagccccaggtgtacaccctgccccctagcagagatgagctgaccaagaaccaggtgtccctgacctgcctggtgaagggcttctaccccagcgacatcgccgtggagtgggagagcaacggccagcccgagaacaactacaagaccaccccccctgtgctggacagcgatggcagcttcttcctgtacagcaagctgaccgtggacaagagcagatggcagcagggcaacgtgttcagctgcagcgtgatgcacgaggccctgcacaatcactacacccagaagagcctgagcctgtcccctggcaagtga

SEQ ID NO: 635 - DNA, 1026 bp, Artificial Sequence
  Synthetic
gacatccagatgacccagagccccagcagcctgagcgcctctgtgggcgatagagtgaccatcacctgcagagccagccaggccatcgacagctacctgcactggtatcagcagaagcctggcaaggcccctaagctgctgatctacagcgccagcaatctggagaccggcgtgcctagcagattcagcggcagcggctccggcaccgacttcaccctgaccatcagcagcctgctgcctgaggatttcgccacctactactgccagcaggtggtgtggagacctttcaccttcggccagggcaccaaggtggagatccagcgggtggagcccaagagcagcgataagacccacacctgccccccctgccctgcccccgagctgctgggcggacccagcgtgttcctgttcccccccaagcctaaggacaccctgatgatcagcagaacccccgaggtgacctgcgtggtggtggatgtgagccacgaggaccctgaggtgaagttcaactggtacgtggacggcgtggaggtgcacaatgccaagaccaagcccagggaggagcagtacaacagcacctaccgggtggtgtccgtgctgaccgtgctgcaccaggattggctgaacggcaaggagtacaagtgcaaggtgtccaacaaggccctgcctgcccctatcgagaaaaccatcagcaaggccaagggccagcccagagagccccaggtgtacaccctgccccctagcagagatgagctgaccaagaaccaggtgtccctgacctgcctggtgaagggcttctaccccagcgacatcgccgtggagtgggagagcaacggccagcccgagaacaactacaagaccaccccccctgtgctggacagcgatggcagcttcttcctgtacagcaagctgaccgtggacaagagcagatggcagcagggcaacgtgttcagctgcagcgtgatgcacgaggccctgcacaatcactacacccagaagagcctgagcctgtcccctggcaagtga

SEQ ID NO: 636 - DNA, 1026 bp, Artificial Sequence
  Synthetic
gacatccagatgacccagagccccagcagcctgagcgcctctgtgggcgatagagtgaccatcacctgcagagccagccaggccatcgacagctacctgcactggtatcagcagaagcctggcaaggcccctaagctgctgatctacagcgccagcaatctggagaccggcgtgcctagcagattcagcggcagcggctccggcaccgacttcaccctgaccatcagcagcctgctgcctgaggatttcgccacctactactgccagcaggtggtgtggagacctttcaccttcggccagggcaccaaggtggagatccaccgggtggagcccaagagcagcgataagacccacacctgccccccctgccctgcccccgagctgctgggcggacccagcgtgttcctgttcccccccaagcctaaggacaccctgatgatcagcagaacccccgaggtgacctgcgtggtggtggatgtgagccacgaggaccctgaggtgaagttcaactggtacgtggacggcgtggaggtgcacaatgccaagaccaagcccagggaggagcagtacaacagcacctaccgggtggtgtccgtgctgaccgtgctgcaccaggattggctgaacggcaaggagtacaagtgcaaggtgtccaacaaggccctgcctgcccctatcgagaaaaccatcagcaaggccaagggccagcccagagagccccaggtgtacaccctgccccctagcagagatgagctgaccaagaaccaggtgtccctgacctgcctggtgaagggcttctaccccagcgacatcgccgtggagtgggagagcaacggccagcccgagaacaactacaagaccaccccccctgtgctggacagcgatggcagcttcttcctgtacagcaagctgaccgtggacaagagcagatggcagcagggcaacgtgttcagctgcagcgtgatgcacgaggccctgcacaatcactacacccagaagagcctgagcctgtcccctggcaagtga

SEQ ID NO: 637 - DNA, 1026 bp, Artificial Sequence
  Synthetic
gacatccagatgacccagagccccagcagcctgagcgcctctgtgggcgatagagtgaccatcacctgcagagccagccaggccatcgacagctacctgcactggtatcagcagaagcctggcaaggcccctaagctgctgatctacagcgccagcaatctggagaccggcgtgcctagcagattcagcggcagcggctccggcaccgacttcaccctgaccatcagcagcctgctgcctgaggatttcgccacctactactgccagcaggtggtgtggagacctttcaccttcggccagggcaccaaggtggagatcccccgggtggagcccaagagcagcgataagacccacacctgccccccctgccctgcccccgagctgctgggcggacccagcgtgttcctgttcccccccaagcctaaggacaccctgatgatcagcagaacccccgaggtgacctgcgtggtggtggatgtgagccacgaggaccctgaggtgaagttcaactggtacgtggacggcgtggaggtgcacaatgccaagaccaagcccagggaggagcagtacaacagcacctaccgggtggtgtccgtgctgaccgtgctgcaccaggattggctgaacggcaaggagtacaagtgcaaggtgtccaacaaggccctgcctgcccctatcgagaaaaccatcagcaaggccaagggccagcccagagagccccaggtgtacaccctgccccctagcagagatgagctgaccaagaaccaggtgtccctgacctgcctggtgaagggcttctaccccagcgacatcgccgtggagtgggagagcaacggccagcccgagaacaactacaagaccaccccccctgtgctggacagcgatggcagcttcttcctgtacagcaagctgaccgtggacaagagcagatggcagcagggcaacgtgttcagctgcagcgtgatgcacgaggccctgcacaatcactacacccagaagagcctgagcctgtcccctggcaagtga

SEQ ID NO: 638 - DNA, 1026 bp, Artificial Sequence
  Synthetic
gacatccagatgacccagagccccagcagcctgagcgcctctgtgggcgatagagtgaccatcacctgcagagccagccaggccatcgacagctacctgcactggtatcagcagaagcctggcaaggcccctaagctgctgatctacagcgccagcaatctggagaccggcgtgcctagcagattcagcggcagcggctccggcaccgacttcaccctgaccatcagcagcctgctgcctgaggatttcgccacctactactgccagcaggtggtgtggagacctttcaccttcggccagggcaccaaggtggagatcaagagcgtggagcccaagagcagcgataagacccacacctgccccccctgccctgcccccgagctgctgggcggacccagcgtgttcctgttcccccccaagcctaaggacaccctgatgatcagcagaacccccgaggtgacctgcgtggtggtggatgtgagccacgaggaccctgaggtgaagttcaactggtacgtggacggcgtggaggtgcacaatgccaagaccaagcccagggaggagcagtacaacagcacctaccgggtggtgtccgtgctgaccgtgctgcaccaggattggctgaacggcaaggagtacaagtgcaaggtgtccaacaaggccctgcctgcccctatcgagaaaaccatcagcaaggccaagggccagcccagagagccccaggtgtacaccctgccccctagcagagatgagctgaccaagaaccaggtgtccctgacctgcctggtgaagggcttctaccccagcgacatcgccgtggagtgggagagcaacggccagcccgagaacaactacaagaccaccccccctgtgctggacagcgatggcagcttcttcctgtacagcaagctgaccgtggacaagagcagatggcagcagggcaacgtgttcagctgcagcgtgatgcacgaggccctgcacaatcactacacccagaagagcctgagcctgtcccctggcaagtga

SEQ ID NO: 639 - DNA, 1026 bp, Artificial Sequence
  Synthetic
gacatccagatgacccagagccccagcagcctgagcgcctctgtgggcgatagagtgaccatcacctgcagagccagccaggccatcgacagctacctgcactggtatcagcagaagcctggcaaggcccctaagctgctgatctacagcgccagcaatctggagaccggcgtgcctagcagattcagcggcagcggctccggcaccgacttcaccctgaccatcagcagcctgctgcctgaggatttcgccacctactactgccagcaggtggtgtggagacctttcaccttcggccagggcaccaaggtggagatcaagctggtggagcccaagagcagcgataagacccacacctgccccccctgccctgcccccgagctgctgggcggacccagcgtgttcctgttcccccccaagcctaaggacaccctgatgatcagcagaacccccgaggtgacctgcgtggtggtggatgtgagccacgaggaccctgaggtgaagttcaactggtacgtggacggcgtggaggtgcacaatgccaagaccaagcccagggaggagcagtacaacagcacctaccgggtggtgtccgtgctgaccgtgctgcaccaggattggctgaacggcaaggagtacaagtgcaaggtgtccaacaaggccctgcctgcccctatcgagaaaaccatcagcaaggccaagggccagcccagagagccccaggtgtacaccctgccccctagcagagatgagctgaccaagaaccaggtgtccctgacctgcctggtgaagggcttctaccccagcgacatcgccgtggagtgggagagcaacggccagcccgagaacaactacaagaccaccccccctgtgctggacagcgatggcagcttcttcctgtacagcaagctgaccgtggacaagagcagatggcagcagggcaacgtgttcagctgcagcgtgatgcacgaggccctgcacaatcactacacccagaagagcctgagcctgtcccctggcaagtga

SEQ ID NO: 640 - DNA, 1026 bp, Artificial Sequence
  Synthetic
gacatccagatgacccagagccccagcagcctgagcgcctctgtgggcgatagagtgaccatcacctgcagagccagccaggccatcgacagctacctgcactggtatcagcagaagcctggcaaggcccctaagctgctgatctacagcgccagcaatctggagaccggcgtgcctagcagattcagcggcagcggctccggcaccgacttcaccctgaccatcagcagcctgctgcctgaggatttcgccacctactactgccagcaggtggtgtggagacctttcaccttcggccagggcaccaaggtggagatcaagtacgtggagcccaagagcagcgataagacccacacctgccccccctgccctgcccccgagctgctgggcggacccagcgtgttcctgttcccccccaagcctaaggacaccctgatgatcagcagaacccccgaggtgacctgcgtggtggtggatgtgagccacgaggaccctgaggtgaagttcaactggtacgtggacggcgtggaggtgcacaatgccaagaccaagcccagggaggagcagtacaacagcacctaccgggtggtgtccgtgctgaccgtgctgcaccaggattggctgaacggcaaggagtacaagtgcaaggtgtccaacaaggccctgcctgcccctatcgagaaaaccatcagcaaggccaagggccagcccagagagccccaggtgtacaccctgccccctagcagagatgagctgaccaagaaccaggtgtccctgacctgcctggtgaagggcttctaccccagcgacatcgccgtggagtgggagagcaacggccagcccgagaacaactacaagaccaccccccctgtgctggacagcgatggcagcttcttcctgtacagcaagctgaccgtggacaagagcagatggcagcagggcaacgtgttcagctgcagcgtgatgcacgaggccctgcacaatcactacacccagaagagcctgagcctgtcccctggcaagtga

SEQ ID NO: 641 - DNA, 1026 bp, Artificial Sequence
  Synthetic
gacatccagatgacccagagccccagcagcctgagcgcctctgtgggcgatagagtgaccatcacctgcagagccagccaggccatcgacagctacctgcactggtatcagcagaagcctggcaaggcccctaagctgctgatctacagcgccagcaatctggagaccggcgtgcctagcagattcagcggcagcggctccggcaccgacttcaccctgaccatcagcagcctgctgcctgaggatttcgccacctactactgccagcaggtggtgtggagacctttcaccttcggccagggcaccaaggtggagatcaaggacgtggagcccaagagcagcgataagacccacacctgccccccctgccctgcccccgagctgctgggcggacccagcgtgttcctgttcccccccaagcctaaggacaccctgatgatcagcagaacccccgaggtgacctgcgtggtggtggatgtgagccacgaggaccctgaggtgaagttcaactggtacgtggacggcgtggaggtgcacaatgccaagaccaagcccagggaggagcagtacaacagcacctaccgggtggtgtccgtgctgaccgtgctgcaccaggattggctgaacggcaaggagtacaagtgcaaggtgtccaacaaggccctgcctgcccctatcgagaaaaccatcagcaaggccaagggccagcccagagagccccaggtgtacaccctgccccctagcagagatgagctgaccaagaaccaggtgtccctgacctgcctggtgaagggcttctaccccagcgacatcgccgtggagtgggagagcaacggccagcccgagaacaactacaagaccaccccccctgtgctggacagcgatggcagcttcttcctgtacagcaagctgaccgtggacaagagcagatggcagcagggcaacgtgttcagctgcagcgtgatgcacgaggccctgcacaatcactacacccagaagagcctgagcctgtcccctggcaagtga

SEQ ID NO: 642 - DNA, 1026 bp, Artificial Sequence
  Synthetic
gacatccagatgacccagagccccagcagcctgagcgcctctgtgggcgatagagtgaccatcacctgcagagccagccaggccatcgacagctacctgcactggtatcagcagaagcctggcaaggcccctaagctgctgatctacagcgccagcaatctggagaccggcgtgcctagcagattcagcggcagcggctccggcaccgacttcaccctgaccatcagcagcctgctgcctgaggatttcgccacctactactgccagcaggtggtgtggagacctttcaccttcggccagggcaccaaggtggagatcaagcaggtggagcccaagagcagcgataagacccacacctgccccccctgccctgcccccgagctgctgggcggacccagcgtgttcctgttcccccccaagcctaaggacaccctgatgatcagcagaacccccgaggtgacctgcgtggtggtggatgtgagccacgaggaccctgaggtgaagttcaactggtacgtggacggcgtggaggtgcacaatgccaagaccaagcccagggaggagcagtacaacagcacctaccgggtggtgtccgtgctgaccgtgctgcaccaggattggctgaacggcaaggagtacaagtgcaaggtgtccaacaaggccctgcctgcccctatcgagaaaaccatcagcaaggccaagggccagcccagagagccccaggtgtacaccctgccccctagcagagatgagctgaccaagaaccaggtgtccctgacctgcctggtgaagggcttctaccccagcgacatcgccgtggagtgggagagcaacggccagcccgagaacaactacaagaccaccccccctgtgctggacagcgatggcagcttcttcctgtacagcaagctgaccgtggacaagagcagatggcagcagggcaacgtgttcagctgcagcgtgatgcacgaggccctgcacaatcactacacccagaagagcctgagcctgtcccctggcaagtga

SEQ ID NO: 643 - DNA, 1026 bp, Artificial Sequence
  Synthetic
gacatccagatgacccagagccccagcagcctgagcgcctctgtgggcgatagagtgaccatcacctgcagagccagccaggccatcgacagctacctgcactggtatcagcagaagcctggcaaggcccctaagctgctgatctacagcgccagcaatctggagaccggcgtgcctagcagattcagcggcagcggctccggcaccgacttcaccctgaccatcagcagcctgctgcctgaggatttcgccacctactactgccagcaggtggtgtggagacctttcaccttcggccagggcaccaaggtggagatcaagcacgtggagcccaagagcagcgataagacccacacctgccccccctgccctgcccccgagctgctgggcggacccagcgtgttcctgttcccccccaagcctaaggacaccctgatgatcagcagaacccccgaggtgacctgcgtggtggtggatgtgagccacgaggaccctgaggtgaagttcaactggtacgtggacggcgtggaggtgcacaatgccaagaccaagcccagggaggagcagtacaacagcacctaccgggtggtgtccgtgctgaccgtgctgcaccaggattggctgaacggcaaggagtacaagtgcaaggtgtccaacaaggccctgcctgcccctatcgagaaaaccatcagcaaggccaagggccagcccagagagccccaggtgtacaccctgccccctagcagagatgagctgaccaagaaccaggtgtccctgacctgcctggtgaagggcttctaccccagcgacatcgccgtggagtgggagagcaacggccagcccgagaacaactacaagaccaccccccctgtgctggacagcgatggcagcttcttcctgtacagcaagctgaccgtggacaagagcagatggcagcagggcaacgtgttcagctgcagcgtgatgcacgaggccctgcacaatcactacacccagaagagcctgagcctgtcccctggcaagtga

SEQ ID NO: 644 - DNA, 1026 bp, Artificial Sequence
  Synthetic
gacatccagatgacccagagccccagcagcctgagcgcctctgtgggcgatagagtgaccatcacctgcagagccagccaggccatcgacagctacctgcactggtatcagcagaagcctggcaaggcccctaagctgctgatctacagcgccagcaatctggagaccggcgtgcctagcagattcagcggcagcggctccggcaccgacttcaccctgaccatcagcagcctgctgcctgaggatttcgccacctactactgccagcaggtggtgtggagacctttcaccttcggccagggcaccaaggtggagatcaagcccgtggagcccaagagcagcgataagacccacacctgccccccctgccctgcccccgagctgctgggcggacccagcgtgttcctgttcccccccaagcctaaggacaccctgatgatcagcagaacccccgaggtgacctgcgtggtggtggatgtgagccacgaggaccctgaggtgaagttcaactggtacgtggacggcgtggaggtgcacaatgccaagaccaagcccagggaggagcagtacaacagcacctaccgggtggtgtccgtgctgaccgtgctgcaccaggattggctgaacggcaaggagtacaagtgcaaggtgtccaacaaggccctgcctgcccctatcgagaaaaccatcagcaaggccaagggccagcccagagagccccaggtgtacaccctgccccctagcagagatgagctgaccaagaaccaggtgtccctgacctgcctggtgaagggcttctaccccagcgacatcgccgtggagtgggagagcaacggccagcccgagaacaactacaagaccaccccccctgtgctggacagcgatggcagcttcttcctgtacagcaagctgaccgtggacaagagcagatggcagcagggcaacgtgttcagctgcagcgtgatgcacgaggccctgcacaatcactacacccagaagagcctgagcctgtcccctggcaagtga

SEQ ID NO: 645 - DNA, 1026 bp, Artificial Sequence
  Synthetic
gacatccagatgacccagagccccagcagcctgagcgcctctgtgggcgatagagtgaccatcacctgcagagccagccaggccatcgacagctacctgcactggtatcagcagaagcctggcaaggcccctaagctgctgatctacagcgccagcaatctggagaccggcgtgcctagcagattcagcggcagcggctccggcaccgacttcaccctgaccatcagcagcctgctgcctgaggatttcgccacctactactgccagcaggtggtgtggagacctttcaccttcggccagggcaccaaggtggagatcaagaaggtggagcccaagagcagcgataagacccacacctgccccccctgccctgcccccgagctgctgggcggacccagcgtgttcctgttcccccccaagcctaaggacaccctgatgatcagcagaacccccgaggtgacctgcgtggtggtggatgtgagccacgaggaccctgaggtgaagttcaactggtacgtggacggcgtggaggtgcacaatgccaagaccaagcccagggaggagcagtacaacagcacctaccgggtggtgtccgtgctgaccgtgctgcaccaggattggctgaacggcaaggagtacaagtgcaaggtgtccaacaaggccctgcctgcccctatcgagaaaaccatcagcaaggccaagggccagcccagagagccccaggtgtacaccctgccccctagcagagatgagctgaccaagaaccaggtgtccctgacctgcctggtgaagggcttctaccccagcgacatcgccgtggagtgggagagcaacggccagcccgagaacaactacaagaccaccccccctgtgctggacagcgatggcagcttcttcctgtacagcaagctgaccgtggacaagagcagatggcagcagggcaacgtgttcagctgcagcgtgatgcacgaggccctgcacaatcactacacccagaagagcctgagcctgtcccctggcaagtga

SEQ ID NO: 646 - DNA, 1026 bp, Artificial Sequence
  Synthetic
gacatccagatgacccagagccccagcagcctgagcgcctctgtgggcgatagagtgaccatcacctgcagagccagccaggccatcgacagctacctgcactggtatcagcagaagcctggcaaggcccctaagctgctgatctacagcgccagcaatctggagaccggcgtgcctagcagattcagcggcagcggctccggcaccgacttcaccctgaccatcagcagcctgctgcctgaggatttcgccacctactactgccagcaggtggtgtggagacctttcaccttcggccagggcaccaaggtggagatcaaggccgtggagcccaagagcagcgataagacccacacctgccccccctgccctgcccccgagctgctgggcggacccagcgtgttcctgttcccccccaagcctaaggacaccctgatgatcagcagaacccccgaggtgacctgcgtggtggtggatgtgagccacgaggaccctgaggtgaagttcaactggtacgtggacggcgtggaggtgcacaatgccaagaccaagcccagggaggagcagtacaacagcacctaccgggtggtgtccgtgctgaccgtgctgcaccaggattggctgaacggcaaggagtacaagtgcaaggtgtccaacaaggccctgcctgcccctatcgagaaaaccatcagcaaggccaagggccagcccagagagccccaggtgtacaccctgccccctagcagagatgagctgaccaagaaccaggtgtccctgacctgcctggtgaagggcttctaccccagcgacatcgccgtggagtgggagagcaacggccagcccgagaacaactacaagaccaccccccctgtgctggacagcgatggcagcttcttcctgtacagcaagctgaccgtggacaagagcagatggcagcagggcaacgtgttcagctgcagcgtgatgcacgaggccctgcacaatcactacacccagaagagcctgagcctgtcccctggcaagtga

SEQ ID NO: 647 - DNA, 1026 bp, Artificial Sequence
  Synthetic
gacatcttcatgacccagagccccagcagcctgagcgcctctgtgggcgatagagtgaccatcacctgcagagccagccaggccatcgacagctacctgcactggtatcagcagaagcctggcaaggcccctaagctgctgatctacagcgccagcaatctggagaccggcgtgcctagcagattcagcggcagcggctccggcaccgacttcaccctgaccatcagcagcctgctgcctgaggatttcgccacctactactgccagcaggtggtgtggagacctttcaccttcggccagggcaccaaggtggagatcaagcgggtggagcccaagagcagcgataagacccacacgtgccccccatgcccagccccagagctgctgggcggacccagcgtgttcctgttcccccccaagcccaaggacaccctgatgatcagcaggacccccgaggtgacctgcgtggtggtggatgtgagccacgaggaccctgaggtgaagttcaactggtacgtggacggcgtggaggtgcacaatgccaagaccaagcccagggaggagcagtacaacagcacctaccgggtggtgtccgtgctgaccgtgctgcaccaggattggctgaacggcaaggagtacaagtgcaaggtgtccaacaaggccctgcctgcccctatcgagaaaaccatcagcaaggccaagggccagcccagagagccccaggtgtacaccctgccccctagcagagatgagctgaccaagaaccaggtgtccctgacctgcctggtgaagggcttctaccccagcgacatcgccgtggagtgggagagcaacggccagcccgagaacaactacaagaccaccccccctgtgctggacagcgatggcagcttcttcctgtacagcaagctgaccgtggacaagagcagatggcagcagggcaacgtgttcagctgcagcgtgatgcacgaggccctgcacaatcactacacccagaagagcctgagcctgtcccctggcaagtga

SEQ ID NO: 648 - DNA, 1026 bp, Artificial Sequence
  Synthetic
gacatccagatgacccagggccccagcagcctgagcgcctctgtgggcgatagagtgaccatcacctgcagagccagccaggccatcgacagctacctgcactggtatcagcagaagcctggcaaggcccctaagctgctgatctacagcgccagcaatctggagaccggcgtgcctagcagattcagcggcagcggctccggcaccgacttcaccctgaccatcagcagcctgctgcctgaggatttcgccacctactactgccagcaggtggtgtggagacctttcaccttcggccagggcaccaaggtggagatcaagcgggtggagcccaagagcagcgataagacccacacgtgccccccatgcccagccccagagctgctgggcggacccagcgtgttcctgttcccccccaagcccaaggacaccctgatgatcagcaggacccccgaggtgacctgcgtggtggtggatgtgagccacgaggaccctgaggtgaagttcaactggtacgtggacggcgtggaggtgcacaatgccaagaccaagcccagggaggagcagtacaacagcacctaccgggtggtgtccgtgctgaccgtgctgcaccaggattggctgaacggcaaggagtacaagtgcaaggtgtccaacaaggccctgcctgcccctatcgagaaaaccatcagcaaggccaagggccagcccagagagccccaggtgtacaccctgccccctagcagagatgagctgaccaagaaccaggtgtccctgacctgcctggtgaagggcttctaccccagcgacatcgccgtggagtgggagagcaacggccagcccgagaacaactacaagaccaccccccctgtgctggacagcgatggcagcttcttcctgtacagcaagctgaccgtggacaagagcagatggcagcagggcaacgtgttcagctgcagcgtgatgcacgaggccctgcacaatcactacacccagaagagcctgagcctgtcccctggcaagtga

SEQ ID NO: 649 - DNA, 1026 bp, Artificial Sequence
  Synthetic
gacatccagatgacccagaaccccagcagcctgagcgcctctgtgggcgatagagtgaccatcacctgcagagccagccaggccatcgacagctacctgcactggtatcagcagaagcctggcaaggcccctaagctgctgatctacagcgccagcaatctggagaccggcgtgcctagcagattcagcggcagcggctccggcaccgacttcaccctgaccatcagcagcctgctgcctgaggatttcgccacctactactgccagcaggtggtgtggagacctttcaccttcggccagggcaccaaggtggagatcaagcgggtggagcccaagagcagcgataagacccacacgtgccccccatgcccagccccagagctgctgggcggacccagcgtgttcctgttcccccccaagcccaaggacaccctgatgatcagcaggacccccgaggtgacctgcgtggtggtggatgtgagccacgaggaccctgaggtgaagttcaactggtacgtggacggcgtggaggtgcacaatgccaagaccaagcccagggaggagcagtacaacagcacctaccgggtggtgtccgtgctgaccgtgctgcaccaggattggctgaacggcaaggagtacaagtgcaaggtgtccaacaaggccctgcctgcccctatcgagaaaaccatcagcaaggccaagggccagcccagagagccccaggtgtacaccctgccccctagcagagatgagctgaccaagaaccaggtgtccctgacctgcctggtgaagggcttctaccccagcgacatcgccgtggagtgggagagcaacggccagcccgagaacaactacaagaccaccccccctgtgctggacagcgatggcagcttcttcctgtacagcaagctgaccgtggacaagagcagatggcagcagggcaacgtgttcagctgcagcgtgatgcacgaggccctgcacaatcactacacccagaagagcctgagcctgtcccctggcaagtga

SEQ ID NO: 650 - DNA, 1026 bp, Artificial Sequence
  Synthetic
gacatccagatgacccagagccccagcagcctggtggcctctgtgggcgatagagtgaccatcacctgcagagccagccaggccatcgacagctacctgcactggtatcagcagaagcctggcaaggcccctaagctgctgatctacagcgccagcaatctggagaccggcgtgcctagcagattcagcggcagcggctccggcaccgacttcaccctgaccatcagcagcctgctgcctgaggatttcgccacctactactgccagcaggtggtgtggagacctttcaccttcggccagggcaccaaggtggagatcaagcgggtggagcccaagagcagcgataagacccacacgtgccccccatgcccagccccagagctgctgggcggacccagcgtgttcctgttcccccccaagcccaaggacaccctgatgatcagcaggacccccgaggtgacctgcgtggtggtggatgtgagccacgaggaccctgaggtgaagttcaactggtacgtggacggcgtggaggtgcacaatgccaagaccaagcccagggaggagcagtacaacagcacctaccgggtggtgtccgtgctgaccgtgctgcaccaggattggctgaacggcaaggagtacaagtgcaaggtgtccaacaaggccctgcctgcccctatcgagaaaaccatcagcaaggccaagggccagcccagagagccccaggtgtacaccctgccccctagcagagatgagctgaccaagaaccaggtgtccctgacctgcctggtgaagggcttctaccccagcgacatcgccgtggagtgggagagcaacggccagcccgagaacaactacaagaccaccccccctgtgctggacagcgatggcagcttcttcctgtacagcaagctgaccgtggacaagagcagatggcagcagggcaacgtgttcagctgcagcgtgatgcacgaggccctgcacaatcactacacccagaagagcctgagcctgtcccctggcaagtga

SEQ ID NO: 651 - DNA, 1026 bp, Artificial Sequence
  Synthetic
gacatccagatgacccagagccccagcagcctgaccgcctctgtgggcgatagagtgaccatcacctgcagagccagccaggccatcgacagctacctgcactggtatcagcagaagcctggcaaggcccctaagctgctgatctacagcgccagcaatctggagaccggcgtgcctagcagattcagcggcagcggctccggcaccgacttcaccctgaccatcagcagcctgctgcctgaggatttcgccacctactactgccagcaggtggtgtggagacctttcaccttcggccagggcaccaaggtggagatcaagcgggtggagcccaagagcagcgataagacccacacgtgccccccatgcccagccccagagctgctgggcggacccagcgtgttcctgttcccccccaagcccaaggacaccctgatgatcagcaggacccccgaggtgacctgcgtggtggtggatgtgagccacgaggaccctgaggtgaagttcaactggtacgtggacggcgtggaggtgcacaatgccaagaccaagcccagggaggagcagtacaacagcacctaccgggtggtgtccgtgctgaccgtgctgcaccaggattggctgaacggcaaggagtacaagtgcaaggtgtccaacaaggccctgcctgcccctatcgagaaaaccatcagcaaggccaagggccagcccagagagccccaggtgtacaccctgccccctagcagagatgagctgaccaagaaccaggtgtccctgacctgcctggtgaagggcttctaccccagcgacatcgccgtggagtgggagagcaacggccagcccgagaacaactacaagaccaccccccctgtgctggacagcgatggcagcttcttcctgtacagcaagctgaccgtggacaagagcagatggcagcagggcaacgtgttcagctgcagcgtgatgcacgaggccctgcacaatcactacacccagaagagcctgagcctgtcccctggcaagtga

SEQ ID NO: 652 - DNA, 1026 bp, Artificial Sequence
  Synthetic
gacatccagatgacccagagccccagcagcctgagcgcctctgtgggcgatagagtgaccatcacctgcagagccagccaggccatcgacagctacctgcactggtatcagcagaagcctggcaaggcccctaagctgctgatctacagcgccagcaatctggagaccggcgtgcctggcagattcagcggcagcggctccggcaccgacttcaccctgaccatcagcagcctgctgcctgaggatttcgccacctactactgccagcaggtggtgtggagacctttcaccttcggccagggcaccaaggtggagatcaagcgggtggagcccaagagcagcgataagacccacacgtgccccccatgcccagccccagagctgctgggcggacccagcgtgttcctgttcccccccaagcccaaggacaccctgatgatcagcaggacccccgaggtgacctgcgtggtggtggatgtgagccacgaggaccctgaggtgaagttcaactggtacgtggacggcgtggaggtgcacaatgccaagaccaagcccagggaggagcagtacaacagcacctaccgggtggtgtccgtgctgaccgtgctgcaccaggattggctgaacggcaaggagtacaagtgcaaggtgtccaacaaggccctgcctgcccctatcgagaaaaccatcagcaaggccaagggccagcccagagagccccaggtgtacaccctgccccctagcagagatgagctgaccaagaaccaggtgtccctgacctgcctggtgaagggcttctaccccagcgacatcgccgtggagtgggagagcaacggccagcccgagaacaactacaagaccaccccccctgtgctggacagcgatggcagcttcttcctgtacagcaagctgaccgtggacaagagcagatggcagcagggcaacgtgttcagctgcagcgtgatgcacgaggccctgcacaatcactacacccagaagagcctgagcctgtcccctggcaagtga

SEQ ID NO: 653 - DNA, 1026 bp, Artificial Sequence
  Synthetic
gacatccagatgacccagagccccagcagcctgagcgcctctgtgggcgatagagtgaccatcacctgcagagccagccaggccatcgacagctacctgcactggtatcagcagaagcctggcaaggcccctaagctgctgatctacagcgccagcaatctggagaccggcgtgcctgagagattcagcggcagcggctccggcaccgacttcaccctgaccatcagcagcctgctgcctgaggatttcgccacctactactgccagcaggtggtgtggagacctttcaccttcggccagggcaccaaggtggagatcaagcgggtggagcccaagagcagcgataagacccacacgtgccccccatgcccagccccagagctgctgggcggacccagcgtgttcctgttcccccccaagcccaaggacaccctgatgatcagcaggacccccgaggtgacctgcgtggtggtggatgtgagccacgaggaccctgaggtgaagttcaactggtacgtggacggcgtggaggtgcacaatgccaagaccaagcccagggaggagcagtacaacagcacctaccgggtggtgtccgtgctgaccgtgctgcaccaggattggctgaacggcaaggagtacaagtgcaaggtgtccaacaaggccctgcctgcccctatcgagaaaaccatcagcaaggccaagggccagcccagagagccccaggtgtacaccctgccccctagcagagatgagctgaccaagaaccaggtgtccctgacctgcctggtgaagggcttctaccccagcgacatcgccgtggagtgggagagcaacggccagcccgagaacaactacaagaccaccccccctgtgctggacagcgatggcagcttcttcctgtacagcaagctgaccgtggacaagagcagatggcagcagggcaacgtgttcagctgcagcgtgatgcacgaggccctgcacaatcactacacccagaagagcctgagcctgtcccctggcaagtga

SEQ ID NO: 654 - DNA, 1026 bp, Artificial Sequence
  Synthetic
gacatccagatgacccagagccccagcagcctgagcgcctctgtgggcgatagagtgaccatcacctgcagagccagccaggccatcgacagctacctgcactggtatcagcagaagcctggcaaggcccctaagctgctgatctacagcgccagcaatctggagaccggcgtgcctagcagattcagcggcagcggctccggcaccgacttcaccctgaccatcagcagcctgttccctgaggatttcgccacctactactgccagcaggtggtgtggagacctttcaccttcggccagggcaccaaggtggagatcaagcgggtggagcccaagagcagcgataagacccacacgtgccccccatgcccagccccagagctgctgggcggacccagcgtgttcctgttcccccccaagcccaaggacaccctgatgatcagcaggacccccgaggtgacctgcgtggtggtggatgtgagccacgaggaccctgaggtgaagttcaactggtacgtggacggcgtggaggtgcacaatgccaagaccaagcccagggaggagcagtacaacagcacctaccgggtggtgtccgtgctgaccgtgctgcaccaggattggctgaacggcaaggagtacaagtgcaaggtgtccaacaaggccctgcctgcccctatcgagaaaaccatcagcaaggccaagggccagcccagagagccccaggtgtacaccctgccccctagcagagatgagctgaccaagaaccaggtgtccctgacctgcctggtgaagggcttctaccccagcgacatcgccgtggagtgggagagcaacggccagcccgagaacaactacaagaccaccccccctgtgctggacagcgatggcagcttcttcctgtacagcaagctgaccgtggacaagagcagatggcagcagggcaacgtgttcagctgcagcgtgatgcacgaggccctgcacaatcactacacccagaagagcctgagcctgtcccctggcaagtga

SEQ ID NO: 655 - DNA, 1026 bp, Artificial Sequence
  Synthetic
gacatccagatgacccagagccccagcagcctgagcgcctctgtgggcgatagagtgaccatcacctgcagagccagccaggccatcgacagctacctgcactggtatcagcagaagcctggcaaggcccctaagctgctgatctacagcgccagcaatctggagaccggcgtgcctagcagattcagcggcagcggctccggcaccgacttcaccctgaccatcagcagcctgggccctgaggatttcgccacctactactgccagcaggtggtgtggagacctttcaccttcggccagggcaccaaggtggagatcaagcgggtggagcccaagagcagcgataagacccacacgtgccccccatgcccagccccagagctgctgggcggacccagcgtgttcctgttcccccccaagcccaaggacaccctgatgatcagcaggacccccgaggtgacctgcgtggtggtggatgtgagccacgaggaccctgaggtgaagttcaactggtacgtggacggcgtggaggtgcacaatgccaagaccaagcccagggaggagcagtacaacagcacctaccgggtggtgtccgtgctgaccgtgctgcaccaggattggctgaacggcaaggagtacaagtgcaaggtgtccaacaaggccctgcctgcccctatcgagaaaaccatcagcaaggccaagggccagcccagagagccccaggtgtacaccctgccccctagcagagatgagctgaccaagaaccaggtgtccctgacctgcctggtgaagggcttctaccccagcgacatcgccgtggagtgggagagcaacggccagcccgagaacaactacaagaccaccccccctgtgctggacagcgatggcagcttcttcctgtacagcaagctgaccgtggacaagagcagatggcagcagggcaacgtgttcagctgcagcgtgatgcacgaggccctgcacaatcactacacccagaagagcctgagcctgtcccctggcaagtga

SEQ ID NO: 656 - DNA, 1026 bp, Artificial Sequence
  Synthetic
gacatctacatgacccagcagcccagcagcctgagcgcctctgtgggcgatagagtgaccatcacctgcagagccagccaggccatcgacagctacctgcactggtatcagcagaagcctggcaaggcccctaagctgctgatctacagcgccagcaatctggagaccggcgtgcctagcagattcagcggcagcggctccggcaccgacttcaccctgaccatcagcagcctgctgcctgaggatttcgccacctactactgccagcaggtggtgtggagacctttcaccttcggccagggcaccaaggtggagatcaagcgggtggagcccaagagcagcgataagacccacacgtgccccccatgcccagccccagagctgctgggcggacccagcgtgttcctgttcccccccaagcccaaggacaccctgatgatcagcaggacccccgaggtgacctgcgtggtggtggatgtgagccacgaggaccctgaggtgaagttcaactggtacgtggacggcgtggaggtgcacaatgccaagaccaagcccagggaggagcagtacaacagcacctaccgggtggtgtccgtgctgaccgtgctgcaccaggattggctgaacggcaaggagtacaagtgcaaggtgtccaacaaggccctgcctgcccctatcgagaaaaccatcagcaaggccaagggccagcccagagagccccaggtgtacaccctgccccctagcagagatgagctgaccaagaaccaggtgtccctgacctgcctggtgaagggcttctaccccagcgacatcgccgtggagtgggagagcaacggccagcccgagaacaactacaagaccaccccccctgtgctggacagcgatggcagcttcttcctgtacagcaagctgaccgtggacaagagcagatggcagcagggcaacgtgttcagctgcagcgtgatgcacgaggccctgcacaatcactacacccagaagagcctgagcctgtcccctggcaagtga

SEQ ID NO: 657 - DNA, 1026 bp, Artificial Sequence
  Synthetic
gacatctacatgacccagagccccagcagcctgctggcctctgtgggcgatagagtgaccatcacctgcagagccagccaggccatcgacagctacctgcactggtatcagcagaagcctggcaaggcccctaagctgctgatctacagcgccagcaatctggagaccggcgtgcctagcagattcagcggcagcggctccggcaccgacttcaccctgaccatcagcagcctgctgcctgaggatttcgccacctactactgccagcaggtggtgtggagacctttcaccttcggccagggcaccaaggtggagatcaagcgggtggagcccaagagcagcgataagacccacacgtgccccccatgcccagccccagagctgctgggcggacccagcgtgttcctgttcccccccaagcccaaggacaccctgatgatcagcaggacccccgaggtgacctgcgtggtggtggatgtgagccacgaggaccctgaggtgaagttcaactggtacgtggacggcgtggaggtgcacaatgccaagaccaagcccagggaggagcagtacaacagcacctaccgggtggtgtccgtgctgaccgtgctgcaccaggattggctgaacggcaaggagtacaagtgcaaggtgtccaacaaggccctgcctgcccctatcgagaaaaccatcagcaaggccaagggccagcccagagagccccaggtgtacaccctgccccctagcagagatgagctgaccaagaaccaggtgtccctgacctgcctggtgaagggcttctaccccagcgacatcgccgtggagtgggagagcaacggccagcccgagaacaactacaagaccaccccccctgtgctggacagcgatggcagcttcttcctgtacagcaagctgaccgtggacaagagcagatggcagcagggcaacgtgttcagctgcagcgtgatgcacgaggccctgcacaatcactacacccagaagagcctgagcctgtcccctggcaagtga

SEQ ID NO: 658 - DNA, 1026 bp, Artificial Sequence
  Synthetic
gacatctacatgacccagagccccagcagcctgagcgcctctgtgggcgatagagtgaccatcacctgcagagccagccaggccatcgacagctacctgcactggtatcagcagaagcctggcaaggcccctaagctgctgatctacagcgccagcaatctggagaccggcgtgcctgccagattcagcggcagcggctccggcaccgacttcaccctgaccatcagcagcctgctgcctgaggatttcgccacctactactgccagcaggtggtgtggagacctttcaccttcggccagggcaccaaggtggagatcaagcgggtggagcccaagagcagcgataagacccacacgtgccccccatgcccagccccagagctgctgggcggacccagcgtgttcctgttcccccccaagcccaaggacaccctgatgatcagcaggacccccgaggtgacctgcgtggtggtggatgtgagccacgaggaccctgaggtgaagttcaactggtacgtggacggcgtggaggtgcacaatgccaagaccaagcccagggaggagcagtacaacagcacctaccgggtggtgtccgtgctgaccgtgctgcaccaggattggctgaacggcaaggagtacaagtgcaaggtgtccaacaaggccctgcctgcccctatcgagaaaaccatcagcaaggccaagggccagcccagagagccccaggtgtacaccctgccccctagcagagatgagctgaccaagaaccaggtgtccctgacctgcctggtgaagggcttctaccccagcgacatcgccgtggagtgggagagcaacggccagcccgagaacaactacaagaccaccccccctgtgctggacagcgatggcagcttcttcctgtacagcaagctgaccgtggacaagagcagatggcagcagggcaacgtgttcagctgcagcgtgatgcacgaggccctgcacaatcactacacccagaagagcctgagcctgtcccctggcaagtga

SEQ ID NO: 659 - DNA, 1026 bp, Artificial Sequence
  Synthetic
gacatctacatgacccagagccccagcagcctgagcgcctctgtgggcgatagagtgaccatcacctgcagagccagccaggccatcgacagctacctgcactggtatcagcagaagcctggcaaggcccctaagctgctgatctacagcgccagcaatctggagaccggcgtgcctagcagattcagcggcagcggctccggcaccgacttcaccctgaccatcagcagcctgtaccctgaggatttcgccacctactactgccagcaggtggtgtggagacctttcaccttcggccagggcaccaaggtggagatcaagcgggtggagcccaagagcagcgataagacccacacgtgccccccatgcccagccccagagctgctgggcggacccagcgtgttcctgttcccccccaagcccaaggacaccctgatgatcagcaggacccccgaggtgacctgcgtggtggtggatgtgagccacgaggaccctgaggtgaagttcaactggtacgtggacggcgtggaggtgcacaatgccaagaccaagcccagggaggagcagtacaacagcacctaccgggtggtgtccgtgctgaccgtgctgcaccaggattggctgaacggcaaggagtacaagtgcaaggtgtccaacaaggccctgcctgcccctatcgagaaaaccatcagcaaggccaagggccagcccagagagccccaggtgtacaccctgccccctagcagagatgagctgaccaagaaccaggtgtccctgacctgcctggtgaagggcttctaccccagcgacatcgccgtggagtgggagagcaacggccagcccgagaacaactacaagaccaccccccctgtgctggacagcgatggcagcttcttcctgtacagcaagctgaccgtggacaagagcagatggcagcagggcaacgtgttcagctgcagcgtgatgcacgaggccctgcacaatcactacacccagaagagcctgagcctgtcccctggcaagtga

SEQ ID NO: 660 - DNA, 1026 bp, Artificial Sequence
  Synthetic
gacatctacatgacccagagccccagcagcctgagcgcctctgtgggcgatagagtgaccatcacctgcagagccagccaggccatcgacagctacctgcactggtatcagcagaagcctggcaaggcccctaagctgctgatctacagcgccagcaatctggagaccggcgtgcctagcagattcagcggcagcggctccggcaccgacttcaccctgaccatcagcagcctgctgcctgaggattacgccacctactactgccagcaggtggtgtggagacctttcaccttcggccagggcaccaaggtggagatcaagcgggtggagcccaagagcagcgataagacccacacgtgccccccatgcccagccccagagctgctgggcggacccagcgtgttcctgttcccccccaagcccaaggacaccctgatgatcagcaggacccccgaggtgacctgcgtggtggtggatgtgagccacgaggaccctgaggtgaagttcaactggtacgtggacggcgtggaggtgcacaatgccaagaccaagcccagggaggagcagtacaacagcacctaccgggtggtgtccgtgctgaccgtgctgcaccaggattggctgaacggcaaggagtacaagtgcaaggtgtccaacaaggccctgcctgcccctatcgagaaaaccatcagcaaggccaagggccagcccagagagccccaggtgtacaccctgccccctagcagagatgagctgaccaagaaccaggtgtccctgacctgcctggtgaagggcttctaccccagcgacatcgccgtggagtgggagagcaacggccagcccgagaacaactacaagaccaccccccctgtgctggacagcgatggcagcttcttcctgtacagcaagctgaccgtggacaagagcagatggcagcagggcaacgtgttcagctgcagcgtgatgcacgaggccctgcacaatcactacacccagaagagcctgagcctgtcccctggcaagtga

SEQ ID NO: 661 - DNA, 1026 bp, Artificial Sequence
  Synthetic
gacatccagatgacccagcagcccagcagcctgctggcctctgtgggcgatagagtgaccatcacctgcagagccagccaggccatcgacagctacctgcactggtatcagcagaagcctggcaaggcccctaagctgctgatctacagcgccagcaatctggagaccggcgtgcctagcagattcagcggcagcggctccggcaccgacttcaccctgaccatcagcagcctgctgcctgaggatttcgccacctactactgccagcaggtggtgtggagacctttcaccttcggccagggcaccaaggtggagatcaagcgggtggagcccaagagcagcgataagacccacacgtgccccccatgcccagccccagagctgctgggcggacccagcgtgttcctgttcccccccaagcccaaggacaccctgatgatcagcaggacccccgaggtgacctgcgtggtggtggatgtgagccacgaggaccctgaggtgaagttcaactggtacgtggacggcgtggaggtgcacaatgccaagaccaagcccagggaggagcagtacaacagcacctaccgggtggtgtccgtgctgaccgtgctgcaccaggattggctgaacggcaaggagtacaagtgcaaggtgtccaacaaggccctgcctgcccctatcgagaaaaccatcagcaaggccaagggccagcccagagagccccaggtgtacaccctgccccctagcagagatgagctgaccaagaaccaggtgtccctgacctgcctggtgaagggcttctaccccagcgacatcgccgtggagtgggagagcaacggccagcccgagaacaactacaagaccaccccccctgtgctggacagcgatggcagcttcttcctgtacagcaagctgaccgtggacaagagcagatggcagcagggcaacgtgttcagctgcagcgtgatgcacgaggccctgcacaatcactacacccagaagagcctgagcctgtcccctggcaagtga

SEQ ID NO: 662 - DNA, 1026 bp, Artificial Sequence
  Synthetic
gacatccagatgacccagcagcccagcagcctgagcgcctctgtgggcgatagagtgaccatcacctgcagagccagccaggccatcgacagctacctgcactggtatcagcagaagcctggcaaggcccctaagctgctgatctacagcgccagcaatctggagaccggcgtgcctgccagattcagcggcagcggctccggcaccgacttcaccctgaccatcagcagcctgctgcctgaggatttcgccacctactactgccagcaggtggtgtggagacctttcaccttcggccagggcaccaaggtggagatcaagcgggtggagcccaagagcagcgataagacccacacgtgccccccatgcccagccccagagctgctgggcggacccagcgtgttcctgttcccccccaagcccaaggacaccctgatgatcagcaggacccccgaggtgacctgcgtggtggtggatgtgagccacgaggaccctgaggtgaagttcaactggtacgtggacggcgtggaggtgcacaatgccaagaccaagcccagggaggagcagtacaacagcacctaccgggtggtgtccgtgctgaccgtgctgcaccaggattggctgaacggcaaggagtacaagtgcaaggtgtccaacaaggccctgcctgcccctatcgagaaaaccatcagcaaggccaagggccagcccagagagccccaggtgtacaccctgccccctagcagagatgagctgaccaagaaccaggtgtccctgacctgcctggtgaagggcttctaccccagcgacatcgccgtggagtgggagagcaacggccagcccgagaacaactacaagaccaccccccctgtgctggacagcgatggcagcttcttcctgtacagcaagctgaccgtggacaagagcagatggcagcagggcaacgtgttcagctgcagcgtgatgcacgaggccctgcacaatcactacacccagaagagcctgagcctgtcccctggcaagtga

SEQ ID NO: 663 - DNA, 1026 bp, Artificial Sequence
  Synthetic
gacatccagatgacccagcagcccagcagcctgagcgcctctgtgggcgatagagtgaccatcacctgcagagccagccaggccatcgacagctacctgcactggtatcagcagaagcctggcaaggcccctaagctgctgatctacagcgccagcaatctggagaccggcgtgcctagcagattcagcggcagcggctccggcaccgacttcaccctgaccatcagcagcctgtaccctgaggatttcgccacctactactgccagcaggtggtgtggagacctttcaccttcggccagggcaccaaggtggagatcaagcgggtggagcccaagagcagcgataagacccacacgtgccccccatgcccagccccagagctgctgggcggacccagcgtgttcctgttcccccccaagcccaaggacaccctgatgatcagcaggacccccgaggtgacctgcgtggtggtggatgtgagccacgaggaccctgaggtgaagttcaactggtacgtggacggcgtggaggtgcacaatgccaagaccaagcccagggaggagcagtacaacagcacctaccgggtggtgtccgtgctgaccgtgctgcaccaggattggctgaacggcaaggagtacaagtgcaaggtgtccaacaaggccctgcctgcccctatcgagaaaaccatcagcaaggccaagggccagcccagagagccccaggtgtacaccctgccccctagcagagatgagctgaccaagaaccaggtgtccctgacctgcctggtgaagggcttctaccccagcgacatcgccgtggagtgggagagcaacggccagcccgagaacaactacaagaccaccccccctgtgctggacagcgatggcagcttcttcctgtacagcaagctgaccgtggacaagagcagatggcagcagggcaacgtgttcagctgcagcgtgatgcacgaggccctgcacaatcactacacccagaagagcctgagcctgtcccctggcaagtga

SEQ ID NO: 664 - DNA, 1026 bp, Artificial Sequence
  Synthetic
gacatccagatgacccagcagcccagcagcctgagcgcctctgtgggcgatagagtgaccatcacctgcagagccagccaggccatcgacagctacctgcactggtatcagcagaagcctggcaaggcccctaagctgctgatctacagcgccagcaatctggagaccggcgtgcctagcagattcagcggcagcggctccggcaccgacttcaccctgaccatcagcagcctgctgcctgaggattacgccacctactactgccagcaggtggtgtggagacctttcaccttcggccagggcaccaaggtggagatcaagcgggtggagcccaagagcagcgataagacccacacgtgccccccatgcccagccccagagctgctgggcggacccagcgtgttcctgttcccccccaagcccaaggacaccctgatgatcagcaggacccccgaggtgacctgcgtggtggtggatgtgagccacgaggaccctgaggtgaagttcaactggtacgtggacggcgtggaggtgcacaatgccaagaccaagcccagggaggagcagtacaacagcacctaccgggtggtgtccgtgctgaccgtgctgcaccaggattggctgaacggcaaggagtacaagtgcaaggtgtccaacaaggccctgcctgcccctatcgagaaaaccatcagcaaggccaagggccagcccagagagccccaggtgtacaccctgccccctagcagagatgagctgaccaagaaccaggtgtccctgacctgcctggtgaagggcttctaccccagcgacatcgccgtggagtgggagagcaacggccagcccgagaacaactacaagaccaccccccctgtgctggacagcgatggcagcttcttcctgtacagcaagctgaccgtggacaagagcagatggcagcagggcaacgtgttcagctgcagcgtgatgcacgaggccctgcacaatcactacacccagaagagcctgagcctgtcccctggcaagtga

SEQ ID NO: 665 - DNA, 1026 bp, Artificial Sequence
  Synthetic
gacatccagatgacccagagccccagcagcctgctggcctctgtgggcgatagagtgaccatcacctgcagagccagccaggccatcgacagctacctgcactggtatcagcagaagcctggcaaggcccctaagctgctgatctacagcgccagcaatctggagaccggcgtgcctgccagattcagcggcagcggctccggcaccgacttcaccctgaccatcagcagcctgctgcctgaggatttcgccacctactactgccagcaggtggtgtggagacctttcaccttcggccagggcaccaaggtggagatcaagcgggtggagcccaagagcagcgataagacccacacgtgccccccatgcccagccccagagctgctgggcggacccagcgtgttcctgttcccccccaagcccaaggacaccctgatgatcagcaggacccccgaggtgacctgcgtggtggtggatgtgagccacgaggaccctgaggtgaagttcaactggtacgtggacggcgtggaggtgcacaatgccaagaccaagcccagggaggagcagtacaacagcacctaccgggtggtgtccgtgctgaccgtgctgcaccaggattggctgaacggcaaggagtacaagtgcaaggtgtccaacaaggccctgcctgcccctatcgagaaaaccatcagcaaggccaagggccagcccagagagccccaggtgtacaccctgccccctagcagagatgagctgaccaagaaccaggtgtccctgacctgcctggtgaagggcttctaccccagcgacatcgccgtggagtgggagagcaacggccagcccgagaacaactacaagaccaccccccctgtgctggacagcgatggcagcttcttcctgtacagcaagctgaccgtggacaagagcagatggcagcagggcaacgtgttcagctgcagcgtgatgcacgaggccctgcacaatcactacacccagaagagcctgagcctgtcccctggcaagtga

SEQ ID NO: 666 - DNA, 1026 bp, Artificial Sequence
  Synthetic
gacatccagatgacccagagccccagcagcctgctggcctctgtgggcgatagagtgaccatcacctgcagagccagccaggccatcgacagctacctgcactggtatcagcagaagcctggcaaggcccctaagctgctgatctacagcgccagcaatctggagaccggcgtgcctagcagattcagcggcagcggctccggcaccgacttcaccctgaccatcagcagcctgtaccctgaggatttcgccacctactactgccagcaggtggtgtggagacctttcaccttcggccagggcaccaaggtggagatcaagcgggtggagcccaagagcagcgataagacccacacgtgccccccatgcccagccccagagctgctgggcggacccagcgtgttcctgttcccccccaagcccaaggacaccctgatgatcagcaggacccccgaggtgacctgcgtggtggtggatgtgagccacgaggaccctgaggtgaagttcaactggtacgtggacggcgtggaggtgcacaatgccaagaccaagcccagggaggagcagtacaacagcacctaccgggtggtgtccgtgctgaccgtgctgcaccaggattggctgaacggcaaggagtacaagtgcaaggtgtccaacaaggccctgcctgcccctatcgagaaaaccatcagcaaggccaagggccagcccagagagccccaggtgtacaccctgccccctagcagagatgagctgaccaagaaccaggtgtccctgacctgcctggtgaagggcttctaccccagcgacatcgccgtggagtgggagagcaacggccagcccgagaacaactacaagaccaccccccctgtgctggacagcgatggcagcttcttcctgtacagcaagctgaccgtggacaagagcagatggcagcagggcaacgtgttcagctgcagcgtgatgcacgaggccctgcacaatcactacacccagaagagcctgagcctgtcccctggcaagtga

SEQ ID NO: 667 - DNA, 1026 bp, Artificial Sequence
  Synthetic
gacatccagatgacccagagccccagcagcctgctggcctctgtgggcgatagagtgaccatcacctgcagagccagccaggccatcgacagctacctgcactggtatcagcagaagcctggcaaggcccctaagctgctgatctacagcgccagcaatctggagaccggcgtgcctagcagattcagcggcagcggctccggcaccgacttcaccctgaccatcagcagcctgctgcctgaggattacgccacctactactgccagcaggtggtgtggagacctttcaccttcggccagggcaccaaggtggagatcaagcgggtggagcccaagagcagcgataagacccacacgtgccccccatgcccagccccagagctgctgggcggacccagcgtgttcctgttcccccccaagcccaaggacaccctgatgatcagcaggacccccgaggtgacctgcgtggtggtggatgtgagccacgaggaccctgaggtgaagttcaactggtacgtggacggcgtggaggtgcacaatgccaagaccaagcccagggaggagcagtacaacagcacctaccgggtggtgtccgtgctgaccgtgctgcaccaggattggctgaacggcaaggagtacaagtgcaaggtgtccaacaaggccctgcctgcccctatcgagaaaaccatcagcaaggccaagggccagcccagagagccccaggtgtacaccctgccccctagcagagatgagctgaccaagaaccaggtgtccctgacctgcctggtgaagggcttctaccccagcgacatcgccgtggagtgggagagcaacggccagcccgagaacaactacaagaccaccccccctgtgctggacagcgatggcagcttcttcctgtacagcaagctgaccgtggacaagagcagatggcagcagggcaacgtgttcagctgcagcgtgatgcacgaggccctgcacaatcactacacccagaagagcctgagcctgtcccctggcaagtga

SEQ ID NO: 668 - DNA, 1026 bp, Artificial Sequence
  Synthetic
gacatccagatgacccagagccccagcagcctgagcgcctctgtgggcgatagagtgaccatcacctgcagagccagccaggccatcgacagctacctgcactggtatcagcagaagcctggcaaggcccctaagctgctgatctacagcgccagcaatctggagaccggcgtgcctgccagattcagcggcagcggctccggcaccgacttcaccctgaccatcagcagcctgtaccctgaggatttcgccacctactactgccagcaggtggtgtggagacctttcaccttcggccagggcaccaaggtggagatcaagcgggtggagcccaagagcagcgataagacccacacgtgccccccatgcccagccccagagctgctgggcggacccagcgtgttcctgttcccccccaagcccaaggacaccctgatgatcagcaggacccccgaggtgacctgcgtggtggtggatgtgagccacgaggaccctgaggtgaagttcaactggtacgtggacggcgtggaggtgcacaatgccaagaccaagcccagggaggagcagtacaacagcacctaccgggtggtgtccgtgctgaccgtgctgcaccaggattggctgaacggcaaggagtacaagtgcaaggtgtccaacaaggccctgcctgcccctatcgagaaaaccatcagcaaggccaagggccagcccagagagccccaggtgtacaccctgccccctagcagagatgagctgaccaagaaccaggtgtccctgacctgcctggtgaagggcttctaccccagcgacatcgccgtggagtgggagagcaacggccagcccgagaacaactacaagaccaccccccctgtgctggacagcgatggcagcttcttcctgtacagcaagctgaccgtggacaagagcagatggcagcagggcaacgtgttcagctgcagcgtgatgcacgaggccctgcacaatcactacacccagaagagcctgagcctgtcccctggcaagtga

SEQ ID NO: 669 - DNA, 1026 bp, Artificial Sequence
  Synthetic
gacatccagatgacccagagccccagcagcctgagcgcctctgtgggcgatagagtgaccatcacctgcagagccagccaggccatcgacagctacctgcactggtatcagcagaagcctggcaaggcccctaagctgctgatctacagcgccagcaatctggagaccggcgtgcctgccagattcagcggcagcggctccggcaccgacttcaccctgaccatcagcagcctgctgcctgaggattacgccacctactactgccagcaggtggtgtggagacctttcaccttcggccagggcaccaaggtggagatcaagcgggtggagcccaagagcagcgataagacccacacgtgccccccatgcccagccccagagctgctgggcggacccagcgtgttcctgttcccccccaagcccaaggacaccctgatgatcagcaggacccccgaggtgacctgcgtggtggtggatgtgagccacgaggaccctgaggtgaagttcaactggtacgtggacggcgtggaggtgcacaatgccaagaccaagcccagggaggagcagtacaacagcacctaccgggtggtgtccgtgctgaccgtgctgcaccaggattggctgaacggcaaggagtacaagtgcaaggtgtccaacaaggccctgcctgcccctatcgagaaaaccatcagcaaggccaagggccagcccagagagccccaggtgtacaccctgccccctagcagagatgagctgaccaagaaccaggtgtccctgacctgcctggtgaagggcttctaccccagcgacatcgccgtggagtgggagagcaacggccagcccgagaacaactacaagaccaccccccctgtgctggacagcgatggcagcttcttcctgtacagcaagctgaccgtggacaagagcagatggcagcagggcaacgtgttcagctgcagcgtgatgcacgaggccctgcacaatcactacacccagaagagcctgagcctgtcccctggcaagtga

SEQ ID NO: 670 - DNA, 1026 bp, Artificial Sequence
  Synthetic
gacatccagatgacccagagccccagcagcctgagcgcctctgtgggcgatagagtgaccatcacctgcagagccagccaggccatcgacagctacctgcactggtatcagcagaagcctggcaaggcccctaagctgctgatctacagcgccagcaatctggagaccggcgtgcctagcagattcagcggcagcggctccggcaccgacttcaccctgaccatcagcagcctgtaccctgaggattacgccacctactactgccagcaggtggtgtggagacctttcaccttcggccagggcaccaaggtggagatcaagcgggtggagcccaagagcagcgataagacccacacgtgccccccatgcccagccccagagctgctgggcggacccagcgtgttcctgttcccccccaagcccaaggacaccctgatgatcagcaggacccccgaggtgacctgcgtggtggtggatgtgagccacgaggaccctgaggtgaagttcaactggtacgtggacggcgtggaggtgcacaatgccaagaccaagcccagggaggagcagtacaacagcacctaccgggtggtgtccgtgctgaccgtgctgcaccaggattggctgaacggcaaggagtacaagtgcaaggtgtccaacaaggccctgcctgcccctatcgagaaaaccatcagcaaggccaagggccagcccagagagccccaggtgtacaccctgccccctagcagagatgagctgaccaagaaccaggtgtccctgacctgcctggtgaagggcttctaccccagcgacatcgccgtggagtgggagagcaacggccagcccgagaacaactacaagaccaccccccctgtgctggacagcgatggcagcttcttcctgtacagcaagctgaccgtggacaagagcagatggcagcagggcaacgtgttcagctgcagcgtgatgcacgaggccctgcacaatcactacacccagaagagcctgagcctgtcccctggcaagtga

SEQ ID NO: 671 - DNA, 1026 bp, Artificial Sequence
  Synthetic
gacatctacatgacccagcagcccagcagcctgctggcctctgtgggcgatagagtgaccatcacctgcagagccagccaggccatcgacagctacctgcactggtatcagcagaagcctggcaaggcccctaagctgctgatctacagcgccagcaatctggagaccggcgtgcctagcagattcagcggcagcggctccggcaccgacttcaccctgaccatcagcagcctgctgcctgaggatttcgccacctactactgccagcaggtggtgtggagacctttcaccttcggccagggcaccaaggtggagatcaagcgggtggagcccaagagcagcgataagacccacacgtgccccccatgcccagccccagagctgctgggcggacccagcgtgttcctgttcccccccaagcccaaggacaccctgatgatcagcaggacccccgaggtgacctgcgtggtggtggatgtgagccacgaggaccctgaggtgaagttcaactggtacgtggacggcgtggaggtgcacaatgccaagaccaagcccagggaggagcagtacaacagcacctaccgggtggtgtccgtgctgaccgtgctgcaccaggattggctgaacggcaaggagtacaagtgcaaggtgtccaacaaggccctgcctgcccctatcgagaaaaccatcagcaaggccaagggccagcccagagagccccaggtgtacaccctgccccctagcagagatgagctgaccaagaaccaggtgtccctgacctgcctggtgaagggcttctaccccagcgacatcgccgtggagtgggagagcaacggccagcccgagaacaactacaagaccaccccccctgtgctggacagcgatggcagcttcttcctgtacagcaagctgaccgtggacaagagcagatggcagcagggcaacgtgttcagctgcagcgtgatgcacgaggccctgcacaatcactacacccagaagagcctgagcctgtcccctggcaagtga

SEQ ID NO: 672 - DNA, 1026 bp, Artificial Sequence
  Synthetic
gacatctacatgacccagcagcccagcagcctgagcgcctctgtgggcgatagagtgaccatcacctgcagagccagccaggccatcgacagctacctgcactggtatcagcagaagcctggcaaggcccctaagctgctgatctacagcgccagcaatctggagaccggcgtgcctgccagattcagcggcagcggctccggcaccgacttcaccctgaccatcagcagcctgctgcctgaggatttcgccacctactactgccagcaggtggtgtggagacctttcaccttcggccagggcaccaaggtggagatcaagcgggtggagcccaagagcagcgataagacccacacgtgccccccatgcccagccccagagctgctgggcggacccagcgtgttcctgttcccccccaagcccaaggacaccctgatgatcagcaggacccccgaggtgacctgcgtggtggtggatgtgagccacgaggaccctgaggtgaagttcaactggtacgtggacggcgtggaggtgcacaatgccaagaccaagcccagggaggagcagtacaacagcacctaccgggtggtgtccgtgctgaccgtgctgcaccaggattggctgaacggcaaggagtacaagtgcaaggtgtccaacaaggccctgcctgcccctatcgagaaaaccatcagcaaggccaagggccagcccagagagccccaggtgtacaccctgccccctagcagagatgagctgaccaagaaccaggtgtccctgacctgcctggtgaagggcttctaccccagcgacatcgccgtggagtgggagagcaacggccagcccgagaacaactacaagaccaccccccctgtgctggacagcgatggcagcttcttcctgtacagcaagctgaccgtggacaagagcagatggcagcagggcaacgtgttcagctgcagcgtgatgcacgaggccctgcacaatcactacacccagaagagcctgagcctgtcccctggcaagtga

SEQ ID NO: 673 - DNA, 1026 bp, Artificial Sequence
  Synthetic
gacatctacatgacccagcagcccagcagcctgagcgcctctgtgggcgatagagtgaccatcacctgcagagccagccaggccatcgacagctacctgcactggtatcagcagaagcctggcaaggcccctaagctgctgatctacagcgccagcaatctggagaccggcgtgcctagcagattcagcggcagcggctccggcaccgacttcaccctgaccatcagcagcctgtaccctgaggatttcgccacctactactgccagcaggtggtgtggagacctttcaccttcggccagggcaccaaggtggagatcaagcgggtggagcccaagagcagcgataagacccacacgtgccccccatgcccagccccagagctgctgggcggacccagcgtgttcctgttcccccccaagcccaaggacaccctgatgatcagcaggacccccgaggtgacctgcgtggtggtggatgtgagccacgaggaccctgaggtgaagttcaactggtacgtggacggcgtggaggtgcacaatgccaagaccaagcccagggaggagcagtacaacagcacctaccgggtggtgtccgtgctgaccgtgctgcaccaggattggctgaacggcaaggagtacaagtgcaaggtgtccaacaaggccctgcctgcccctatcgagaaaaccatcagcaaggccaagggccagcccagagagccccaggtgtacaccctgccccctagcagagatgagctgaccaagaaccaggtgtccctgacctgcctggtgaagggcttctaccccagcgacatcgccgtggagtgggagagcaacggccagcccgagaacaactacaagaccaccccccctgtgctggacagcgatggcagcttcttcctgtacagcaagctgaccgtggacaagagcagatggcagcagggcaacgtgttcagctgcagcgtgatgcacgaggccctgcacaatcactacacccagaagagcctgagcctgtcccctggcaagtga

SEQ ID NO: 674 - DNA, 1026 bp, Artificial Sequence
  Synthetic
gacatctacatgacccagcagcccagcagcctgagcgcctctgtgggcgatagagtgaccatcacctgcagagccagccaggccatcgacagctacctgcactggtatcagcagaagcctggcaaggcccctaagctgctgatctacagcgccagcaatctggagaccggcgtgcctagcagattcagcggcagcggctccggcaccgacttcaccctgaccatcagcagcctgctgcctgaggattacgccacctactactgccagcaggtggtgtggagacctttcaccttcggccagggcaccaaggtggagatcaagcgggtggagcccaagagcagcgataagacccacacgtgccccccatgcccagccccagagctgctgggcggacccagcgtgttcctgttcccccccaagcccaaggacaccctgatgatcagcaggacccccgaggtgacctgcgtggtggtggatgtgagccacgaggaccctgaggtgaagttcaactggtacgtggacggcgtggaggtgcacaatgccaagaccaagcccagggaggagcagtacaacagcacctaccgggtggtgtccgtgctgaccgtgctgcaccaggattggctgaacggcaaggagtacaagtgcaaggtgtccaacaaggccctgcctgcccctatcgagaaaaccatcagcaaggccaagggccagcccagagagccccaggtgtacaccctgccccctagcagagatgagctgaccaagaaccaggtgtccctgacctgcctggtgaagggcttctaccccagcgacatcgccgtggagtgggagagcaacggccagcccgagaacaactacaagaccaccccccctgtgctggacagcgatggcagcttcttcctgtacagcaagctgaccgtggacaagagcagatggcagcagggcaacgtgttcagctgcagcgtgatgcacgaggccctgcacaatcactacacccagaagagcctgagcctgtcccctggcaagtga

SEQ ID NO: 675 - DNA, 1026 bp, Artificial Sequence
  Synthetic
gacatctacatgacccagagccccagcagcctgctggcctctgtgggcgatagagtgaccatcacctgcagagccagccaggccatcgacagctacctgcactggtatcagcagaagcctggcaaggcccctaagctgctgatctacagcgccagcaatctggagaccggcgtgcctgccagattcagcggcagcggctccggcaccgacttcaccctgaccatcagcagcctgctgcctgaggatttcgccacctactactgccagcaggtggtgtggagacctttcaccttcggccagggcaccaaggtggagatcaagcgggtggagcccaagagcagcgataagacccacacgtgccccccatgcccagccccagagctgctgggcggacccagcgtgttcctgttcccccccaagcccaaggacaccctgatgatcagcaggacccccgaggtgacctgcgtggtggtggatgtgagccacgaggaccctgaggtgaagttcaactggtacgtggacggcgtggaggtgcacaatgccaagaccaagcccagggaggagcagtacaacagcacctaccgggtggtgtccgtgctgaccgtgctgcaccaggattggctgaacggcaaggagtacaagtgcaaggtgtccaacaaggccctgcctgcccctatcgagaaaaccatcagcaaggccaagggccagcccagagagccccaggtgtacaccctgccccctagcagagatgagctgaccaagaaccaggtgtccctgacctgcctggtgaagggcttctaccccagcgacatcgccgtggagtgggagagcaacggccagcccgagaacaactacaagaccaccccccctgtgctggacagcgatggcagcttcttcctgtacagcaagctgaccgtggacaagagcagatggcagcagggcaacgtgttcagctgcagcgtgatgcacgaggccctgcacaatcactacacccagaagagcctgagcctgtcccctggcaagtga

SEQ ID NO: 676 - DNA, 1026 bp, Artificial Sequence
  Synthetic
gacatctacatgacccagagccccagcagcctgctggcctctgtgggcgatagagtgaccatcacctgcagagccagccaggccatcgacagctacctgcactggtatcagcagaagcctggcaaggcccctaagctgctgatctacagcgccagcaatctggagaccggcgtgcctagcagattcagcggcagcggctccggcaccgacttcaccctgaccatcagcagcctgtaccctgaggatttcgccacctactactgccagcaggtggtgtggagacctttcaccttcggccagggcaccaaggtggagatcaagcgggtggagcccaagagcagcgataagacccacacgtgccccccatgcccagccccagagctgctgggcggacccagcgtgttcctgttcccccccaagcccaaggacaccctgatgatcagcaggacccccgaggtgacctgcgtggtggtggatgtgagccacgaggaccctgaggtgaagttcaactggtacgtggacggcgtggaggtgcacaatgccaagaccaagcccagggaggagcagtacaacagcacctaccgggtggtgtccgtgctgaccgtgctgcaccaggattggctgaacggcaaggagtacaagtgcaaggtgtccaacaaggccctgcctgcccctatcgagaaaaccatcagcaaggccaagggccagcccagagagccccaggtgtacaccctgccccctagcagagatgagctgaccaagaaccaggtgtccctgacctgcctggtgaagggcttctaccccagcgacatcgccgtggagtgggagagcaacggccagcccgagaacaactacaagaccaccccccctgtgctggacagcgatggcagcttcttcctgtacagcaagctgaccgtggacaagagcagatggcagcagggcaacgtgttcagctgcagcgtgatgcacgaggccctgcacaatcactacacccagaagagcctgagcctgtcccctggcaagtga

SEQ ID NO: 677 - DNA, 1026 bp, Artificial Sequence
  Synthetic
gacatctacatgacccagagccccagcagcctgctggcctctgtgggcgatagagtgaccatcacctgcagagccagccaggccatcgacagctacctgcactggtatcagcagaagcctggcaaggcccctaagctgctgatctacagcgccagcaatctggagaccggcgtgcctagcagattcagcggcagcggctccggcaccgacttcaccctgaccatcagcagcctgctgcctgaggattacgccacctactactgccagcaggtggtgtggagacctttcaccttcggccagggcaccaaggtggagatcaagcgggtggagcccaagagcagcgataagacccacacgtgccccccatgcccagccccagagctgctgggcggacccagcgtgttcctgttcccccccaagcccaaggacaccctgatgatcagcaggacccccgaggtgacctgcgtggtggtggatgtgagccacgaggaccctgaggtgaagttcaactggtacgtggacggcgtggaggtgcacaatgccaagaccaagcccagggaggagcagtacaacagcacctaccgggtggtgtccgtgctgaccgtgctgcaccaggattggctgaacggcaaggagtacaagtgcaaggtgtccaacaaggccctgcctgcccctatcgagaaaaccatcagcaaggccaagggccagcccagagagccccaggtgtacaccctgccccctagcagagatgagctgaccaagaaccaggtgtccctgacctgcctggtgaagggcttctaccccagcgacatcgccgtggagtgggagagcaacggccagcccgagaacaactacaagaccaccccccctgtgctggacagcgatggcagcttcttcctgtacagcaagctgaccgtggacaagagcagatggcagcagggcaacgtgttcagctgcagcgtgatgcacgaggccctgcacaatcactacacccagaagagcctgagcctgtcccctggcaagtga

SEQ ID NO: 678 - DNA, 1026 bp, Artificial Sequence
  Synthetic
gacatctacatgacccagagccccagcagcctgagcgcctctgtgggcgatagagtgaccatcacctgcagagccagccaggccatcgacagctacctgcactggtatcagcagaagcctggcaaggcccctaagctgctgatctacagcgccagcaatctggagaccggcgtgcctgccagattcagcggcagcggctccggcaccgacttcaccctgaccatcagcagcctgtaccctgaggatttcgccacctactactgccagcaggtggtgtggagacctttcaccttcggccagggcaccaaggtggagatcaagcgggtggagcccaagagcagcgataagacccacacgtgccccccatgcccagccccagagctgctgggcggacccagcgtgttcctgttcccccccaagcccaaggacaccctgatgatcagcaggacccccgaggtgacctgcgtggtggtggatgtgagccacgaggaccctgaggtgaagttcaactggtacgtggacggcgtggaggtgcacaatgccaagaccaagcccagggaggagcagtacaacagcacctaccgggtggtgtccgtgctgaccgtgctgcaccaggattggctgaacggcaaggagtacaagtgcaaggtgtccaacaaggccctgcctgcccctatcgagaaaaccatcagcaaggccaagggccagcccagagagccccaggtgtacaccctgccccctagcagagatgagctgaccaagaaccaggtgtccctgacctgcctggtgaagggcttctaccccagcgacatcgccgtggagtgggagagcaacggccagcccgagaacaactacaagaccaccccccctgtgctggacagcgatggcagcttcttcctgtacagcaagctgaccgtggacaagagcagatggcagcagggcaacgtgttcagctgcagcgtgatgcacgaggccctgcacaatcactacacccagaagagcctgagcctgtcccctggcaagtga

SEQ ID NO: 679 - DNA, 1026 bp, Artificial Sequence
  Synthetic
gacatctacatgacccagagccccagcagcctgagcgcctctgtgggcgatagagtgaccatcacctgcagagccagccaggccatcgacagctacctgcactggtatcagcagaagcctggcaaggcccctaagctgctgatctacagcgccagcaatctggagaccggcgtgcctgccagattcagcggcagcggctccggcaccgacttcaccctgaccatcagcagcctgctgcctgaggattacgccacctactactgccagcaggtggtgtggagacctttcaccttcggccagggcaccaaggtggagatcaagcgggtggagcccaagagcagcgataagacccacacgtgccccccatgcccagccccagagctgctgggcggacccagcgtgttcctgttcccccccaagcccaaggacaccctgatgatcagcaggacccccgaggtgacctgcgtggtggtggatgtgagccacgaggaccctgaggtgaagttcaactggtacgtggacggcgtggaggtgcacaatgccaagaccaagcccagggaggagcagtacaacagcacctaccgggtggtgtccgtgctgaccgtgctgcaccaggattggctgaacggcaaggagtacaagtgcaaggtgtccaacaaggccctgcctgcccctatcgagaaaaccatcagcaaggccaagggccagcccagagagccccaggtgtacaccctgccccctagcagagatgagctgaccaagaaccaggtgtccctgacctgcctggtgaagggcttctaccccagcgacatcgccgtggagtgggagagcaacggccagcccgagaacaactacaagaccaccccccctgtgctggacagcgatggcagcttcttcctgtacagcaagctgaccgtggacaagagcagatggcagcagggcaacgtgttcagctgcagcgtgatgcacgaggccctgcacaatcactacacccagaagagcctgagcctgtcccctggcaagtga

SEQ ID NO: 680 - DNA, 1026 bp, Artificial Sequence
  Synthetic
gacatctacatgacccagagccccagcagcctgagcgcctctgtgggcgatagagtgaccatcacctgcagagccagccaggccatcgacagctacctgcactggtatcagcagaagcctggcaaggcccctaagctgctgatctacagcgccagcaatctggagaccggcgtgcctagcagattcagcggcagcggctccggcaccgacttcaccctgaccatcagcagcctgtaccctgaggattacgccacctactactgccagcaggtggtgtggagacctttcaccttcggccagggcaccaaggtggagatcaagcgggtggagcccaagagcagcgataagacccacacgtgccccccatgcccagccccagagctgctgggcggacccagcgtgttcctgttcccccccaagcccaaggacaccctgatgatcagcaggacccccgaggtgacctgcgtggtggtggatgtgagccacgaggaccctgaggtgaagttcaactggtacgtggacggcgtggaggtgcacaatgccaagaccaagcccagggaggagcagtacaacagcacctaccgggtggtgtccgtgctgaccgtgctgcaccaggattggctgaacggcaaggagtacaagtgcaaggtgtccaacaaggccctgcctgcccctatcgagaaaaccatcagcaaggccaagggccagcccagagagccccaggtgtacaccctgccccctagcagagatgagctgaccaagaaccaggtgtccctgacctgcctggtgaagggcttctaccccagcgacatcgccgtggagtgggagagcaacggccagcccgagaacaactacaagaccaccccccctgtgctggacagcgatggcagcttcttcctgtacagcaagctgaccgtggacaagagcagatggcagcagggcaacgtgttcagctgcagcgtgatgcacgaggccctgcacaatcactacacccagaagagcctgagcctgtcccctggcaagtga

SEQ ID NO: 681 - DNA, 1026 bp, Artificial Sequence
  Synthetic
gacatccagatgacccagcagcccagcagcctgctggcctctgtgggcgatagagtgaccatcacctgcagagccagccaggccatcgacagctacctgcactggtatcagcagaagcctggcaaggcccctaagctgctgatctacagcgccagcaatctggagaccggcgtgcctgccagattcagcggcagcggctccggcaccgacttcaccctgaccatcagcagcctgctgcctgaggatttcgccacctactactgccagcaggtggtgtggagacctttcaccttcggccagggcaccaaggtggagatcaagcgggtggagcccaagagcagcgataagacccacacgtgccccccatgcccagccccagagctgctgggcggacccagcgtgttcctgttcccccccaagcccaaggacaccctgatgatcagcaggacccccgaggtgacctgcgtggtggtggatgtgagccacgaggaccctgaggtgaagttcaactggtacgtggacggcgtggaggtgcacaatgccaagaccaagcccagggaggagcagtacaacagcacctaccgggtggtgtccgtgctgaccgtgctgcaccaggattggctgaacggcaaggagtacaagtgcaaggtgtccaacaaggccctgcctgcccctatcgagaaaaccatcagcaaggccaagggccagcccagagagccccaggtgtacaccctgccccctagcagagatgagctgaccaagaaccaggtgtccctgacctgcctggtgaagggcttctaccccagcgacatcgccgtggagtgggagagcaacggccagcccgagaacaactacaagaccaccccccctgtgctggacagcgatggcagcttcttcctgtacagcaagctgaccgtggacaagagcagatggcagcagggcaacgtgttcagctgcagcgtgatgcacgaggccctgcacaatcactacacccagaagagcctgagcctgtcccctggcaagtga

SEQ ID NO: 682 - DNA, 1026 bp, Artificial Sequence
  Synthetic
gacatccagatgacccagcagcccagcagcctgctggcctctgtgggcgatagagtgaccatcacctgcagagccagccaggccatcgacagctacctgcactggtatcagcagaagcctggcaaggcccctaagctgctgatctacagcgccagcaatctggagaccggcgtgcctagcagattcagcggcagcggctccggcaccgacttcaccctgaccatcagcagcctgtaccctgaggatttcgccacctactactgccagcaggtggtgtggagacctttcaccttcggccagggcaccaaggtggagatcaagcgggtggagcccaagagcagcgataagacccacacgtgccccccatgcccagccccagagctgctgggcggacccagcgtgttcctgttcccccccaagcccaaggacaccctgatgatcagcaggacccccgaggtgacctgcgtggtggtggatgtgagccacgaggaccctgaggtgaagttcaactggtacgtggacggcgtggaggtgcacaatgccaagaccaagcccagggaggagcagtacaacagcacctaccgggtggtgtccgtgctgaccgtgctgcaccaggattggctgaacggcaaggagtacaagtgcaaggtgtccaacaaggccctgcctgcccctatcgagaaaaccatcagcaaggccaagggccagcccagagagccccaggtgtacaccctgccccctagcagagatgagctgaccaagaaccaggtgtccctgacctgcctggtgaagggcttctaccccagcgacatcgccgtggagtgggagagcaacggccagcccgagaacaactacaagaccaccccccctgtgctggacagcgatggcagcttcttcctgtacagcaagctgaccgtggacaagagcagatggcagcagggcaacgtgttcagctgcagcgtgatgcacgaggccctgcacaatcactacacccagaagagcctgagcctgtcccctggcaagtga

SEQ ID NO: 683 - DNA, 1026 bp, Artificial Sequence
  Synthetic
gacatccagatgacccagcagcccagcagcctgctggcctctgtgggcgatagagtgaccatcacctgcagagccagccaggccatcgacagctacctgcactggtatcagcagaagcctggcaaggcccctaagctgctgatctacagcgccagcaatctggagaccggcgtgcctagcagattcagcggcagcggctccggcaccgacttcaccctgaccatcagcagcctgctgcctgaggattacgccacctactactgccagcaggtggtgtggagacctttcaccttcggccagggcaccaaggtggagatcaagcgggtggagcccaagagcagcgataagacccacacgtgccccccatgcccagccccagagctgctgggcggacccagcgtgttcctgttcccccccaagcccaaggacaccctgatgatcagcaggacccccgaggtgacctgcgtggtggtggatgtgagccacgaggaccctgaggtgaagttcaactggtacgtggacggcgtggaggtgcacaatgccaagaccaagcccagggaggagcagtacaacagcacctaccgggtggtgtccgtgctgaccgtgctgcaccaggattggctgaacggcaaggagtacaagtgcaaggtgtccaacaaggccctgcctgcccctatcgagaaaaccatcagcaaggccaagggccagcccagagagccccaggtgtacaccctgccccctagcagagatgagctgaccaagaaccaggtgtccctgacctgcctggtgaagggcttctaccccagcgacatcgccgtggagtgggagagcaacggccagcccgagaacaactacaagaccaccccccctgtgctggacagcgatggcagcttcttcctgtacagcaagctgaccgtggacaagagcagatggcagcagggcaacgtgttcagctgcagcgtgatgcacgaggccctgcacaatcactacacccagaagagcctgagcctgtcccctggcaagtga

SEQ ID NO: 684 - DNA, 1026 bp, Artificial Sequence
  Synthetic
gacatccagatgacccagcagcccagcagcctgagcgcctctgtgggcgatagagtgaccatcacctgcagagccagccaggccatcgacagctacctgcactggtatcagcagaagcctggcaaggcccctaagctgctgatctacagcgccagcaatctggagaccggcgtgcctgccagattcagcggcagcggctccggcaccgacttcaccctgaccatcagcagcctgtaccctgaggatttcgccacctactactgccagcaggtggtgtggagacctttcaccttcggccagggcaccaaggtggagatcaagcgggtggagcccaagagcagcgataagacccacacgtgccccccatgcccagccccagagctgctgggcggacccagcgtgttcctgttcccccccaagcccaaggacaccctgatgatcagcaggacccccgaggtgacctgcgtggtggtggatgtgagccacgaggaccctgaggtgaagttcaactggtacgtggacggcgtggaggtgcacaatgccaagaccaagcccagggaggagcagtacaacagcacctaccgggtggtgtccgtgctgaccgtgctgcaccaggattggctgaacggcaaggagtacaagtgcaaggtgtccaacaaggccctgcctgcccctatcgagaaaaccatcagcaaggccaagggccagcccagagagccccaggtgtacaccctgccccctagcagagatgagctgaccaagaaccaggtgtccctgacctgcctggtgaagggcttctaccccagcgacatcgccgtggagtgggagagcaacggccagcccgagaacaactacaagaccaccccccctgtgctggacagcgatggcagcttcttcctgtacagcaagctgaccgtggacaagagcagatggcagcagggcaacgtgttcagctgcagcgtgatgcacgaggccctgcacaatcactacacccagaagagcctgagcctgtcccctggcaagtga

SEQ ID NO: 685 - DNA, 1026 bp, Artificial Sequence
  Synthetic
gacatccagatgacccagcagcccagcagcctgagcgcctctgtgggcgatagagtgaccatcacctgcagagccagccaggccatcgacagctacctgcactggtatcagcagaagcctggcaaggcccctaagctgctgatctacagcgccagcaatctggagaccggcgtgcctgccagattcagcggcagcggctccggcaccgacttcaccctgaccatcagcagcctgctgcctgaggattacgccacctactactgccagcaggtggtgtggagacctttcaccttcggccagggcaccaaggtggagatcaagcgggtggagcccaagagcagcgataagacccacacgtgccccccatgcccagccccagagctgctgggcggacccagcgtgttcctgttcccccccaagcccaaggacaccctgatgatcagcaggacccccgaggtgacctgcgtggtggtggatgtgagccacgaggaccctgaggtgaagttcaactggtacgtggacggcgtggaggtgcacaatgccaagaccaagcccagggaggagcagtacaacagcacctaccgggtggtgtccgtgctgaccgtgctgcaccaggattggctgaacggcaaggagtacaagtgcaaggtgtccaacaaggccctgcctgcccctatcgagaaaaccatcagcaaggccaagggccagcccagagagccccaggtgtacaccctgccccctagcagagatgagctgaccaagaaccaggtgtccctgacctgcctggtgaagggcttctaccccagcgacatcgccgtggagtgggagagcaacggccagcccgagaacaactacaagaccaccccccctgtgctggacagcgatggcagcttcttcctgtacagcaagctgaccgtggacaagagcagatggcagcagggcaacgtgttcagctgcagcgtgatgcacgaggccctgcacaatcactacacccagaagagcctgagcctgtcccctggcaagtga

SEQ ID NO: 686 - DNA, 1026 bp, Artificial Sequence
  Synthetic
gacatccagatgacccagcagcccagcagcctgagcgcctctgtgggcgatagagtgaccatcacctgcagagccagccaggccatcgacagctacctgcactggtatcagcagaagcctggcaaggcccctaagctgctgatctacagcgccagcaatctggagaccggcgtgcctagcagattcagcggcagcggctccggcaccgacttcaccctgaccatcagcagcctgtaccctgaggattacgccacctactactgccagcaggtggtgtggagacctttcaccttcggccagggcaccaaggtggagatcaagcgggtggagcccaagagcagcgataagacccacacgtgccccccatgcccagccccagagctgctgggcggacccagcgtgttcctgttcccccccaagcccaaggacaccctgatgatcagcaggacccccgaggtgacctgcgtggtggtggatgtgagccacgaggaccctgaggtgaagttcaactggtacgtggacggcgtggaggtgcacaatgccaagaccaagcccagggaggagcagtacaacagcacctaccgggtggtgtccgtgctgaccgtgctgcaccaggattggctgaacggcaaggagtacaagtgcaaggtgtccaacaaggccctgcctgcccctatcgagaaaaccatcagcaaggccaagggccagcccagagagccccaggtgtacaccctgccccctagcagagatgagctgaccaagaaccaggtgtccctgacctgcctggtgaagggcttctaccccagcgacatcgccgtggagtgggagagcaacggccagcccgagaacaactacaagaccaccccccctgtgctggacagcgatggcagcttcttcctgtacagcaagctgaccgtggacaagagcagatggcagcagggcaacgtgttcagctgcagcgtgatgcacgaggccctgcacaatcactacacccagaagagcctgagcctgtcccctggcaagtga

SEQ ID NO: 687 - DNA, 1026 bp, Artificial Sequence
  Synthetic
gacatccagatgacccagagccccagcagcctgctggcctctgtgggcgatagagtgaccatcacctgcagagccagccaggccatcgacagctacctgcactggtatcagcagaagcctggcaaggcccctaagctgctgatctacagcgccagcaatctggagaccggcgtgcctgccagattcagcggcagcggctccggcaccgacttcaccctgaccatcagcagcctgtaccctgaggatttcgccacctactactgccagcaggtggtgtggagacctttcaccttcggccagggcaccaaggtggagatcaagcgggtggagcccaagagcagcgataagacccacacgtgccccccatgcccagccccagagctgctgggcggacccagcgtgttcctgttcccccccaagcccaaggacaccctgatgatcagcaggacccccgaggtgacctgcgtggtggtggatgtgagccacgaggaccctgaggtgaagttcaactggtacgtggacggcgtggaggtgcacaatgccaagaccaagcccagggaggagcagtacaacagcacctaccgggtggtgtccgtgctgaccgtgctgcaccaggattggctgaacggcaaggagtacaagtgcaaggtgtccaacaaggccctgcctgcccctatcgagaaaaccatcagcaaggccaagggccagcccagagagccccaggtgtacaccctgccccctagcagagatgagctgaccaagaaccaggtgtccctgacctgcctggtgaagggcttctaccccagcgacatcgccgtggagtgggagagcaacggccagcccgagaacaactacaagaccaccccccctgtgctggacagcgatggcagcttcttcctgtacagcaagctgaccgtggacaagagcagatggcagcagggcaacgtgttcagctgcagcgtgatgcacgaggccctgcacaatcactacacccagaagagcctgagcctgtcccctggcaagtga

SEQ ID NO: 688 - DNA, 1026 bp, Artificial Sequence
  Synthetic
gacatccagatgacccagagccccagcagcctgctggcctctgtgggcgatagagtgaccatcacctgcagagccagccaggccatcgacagctacctgcactggtatcagcagaagcctggcaaggcccctaagctgctgatctacagcgccagcaatctggagaccggcgtgcctgccagattcagcggcagcggctccggcaccgacttcaccctgaccatcagcagcctgctgcctgaggattacgccacctactactgccagcaggtggtgtggagacctttcaccttcggccagggcaccaaggtggagatcaagcgggtggagcccaagagcagcgataagacccacacgtgccccccatgcccagccccagagctgctgggcggacccagcgtgttcctgttcccccccaagcccaaggacaccctgatgatcagcaggacccccgaggtgacctgcgtggtggtggatgtgagccacgaggaccctgaggtgaagttcaactggtacgtggacggcgtggaggtgcacaatgccaagaccaagcccagggaggagcagtacaacagcacctaccgggtggtgtccgtgctgaccgtgctgcaccaggattggctgaacggcaaggagtacaagtgcaaggtgtccaacaaggccctgcctgcccctatcgagaaaaccatcagcaaggccaagggccagcccagagagccccaggtgtacaccctgccccctagcagagatgagctgaccaagaaccaggtgtccctgacctgcctggtgaagggcttctaccccagcgacatcgccgtggagtgggagagcaacggccagcccgagaacaactacaagaccaccccccctgtgctggacagcgatggcagcttcttcctgtacagcaagctgaccgtggacaagagcagatggcagcagggcaacgtgttcagctgcagcgtgatgcacgaggccctgcacaatcactacacccagaagagcctgagcctgtcccctggcaagtga

SEQ ID NO: 689 - DNA, 1026 bp, Artificial Sequence
  Synthetic
gacatccagatgacccagagccccagcagcctgctggcctctgtgggcgatagagtgaccatcacctgcagagccagccaggccatcgacagctacctgcactggtatcagcagaagcctggcaaggcccctaagctgctgatctacagcgccagcaatctggagaccggcgtgcctagcagattcagcggcagcggctccggcaccgacttcaccctgaccatcagcagcctgtaccctgaggattacgccacctactactgccagcaggtggtgtggagacctttcaccttcggccagggcaccaaggtggagatcaagcgggtggagcccaagagcagcgataagacccacacgtgccccccatgcccagccccagagctgctgggcggacccagcgtgttcctgttcccccccaagcccaaggacaccctgatgatcagcaggacccccgaggtgacctgcgtggtggtggatgtgagccacgaggaccctgaggtgaagttcaactggtacgtggacggcgtggaggtgcacaatgccaagaccaagcccagggaggagcagtacaacagcacctaccgggtggtgtccgtgctgaccgtgctgcaccaggattggctgaacggcaaggagtacaagtgcaaggtgtccaacaaggccctgcctgcccctatcgagaaaaccatcagcaaggccaagggccagcccagagagccccaggtgtacaccctgccccctagcagagatgagctgaccaagaaccaggtgtccctgacctgcctggtgaagggcttctaccccagcgacatcgccgtggagtgggagagcaacggccagcccgagaacaactacaagaccaccccccctgtgctggacagcgatggcagcttcttcctgtacagcaagctgaccgtggacaagagcagatggcagcagggcaacgtgttcagctgcagcgtgatgcacgaggccctgcacaatcactacacccagaagagcctgagcctgtcccctggcaagtga

SEQ ID NO: 690 - DNA, 1026 bp, Artificial Sequence
  Synthetic
gacatccagatgacccagagccccagcagcctgagcgcctctgtgggcgatagagtgaccatcacctgcagagccagccaggccatcgacagctacctgcactggtatcagcagaagcctggcaaggcccctaagctgctgatctacagcgccagcaatctggagaccggcgtgcctgccagattcagcggcagcggctccggcaccgacttcaccctgaccatcagcagcctgtaccctgaggattacgccacctactactgccagcaggtggtgtggagacctttcaccttcggccagggcaccaaggtggagatcaagcgggtggagcccaagagcagcgataagacccacacgtgccccccatgcccagccccagagctgctgggcggacccagcgtgttcctgttcccccccaagcccaaggacaccctgatgatcagcaggacccccgaggtgacctgcgtggtggtggatgtgagccacgaggaccctgaggtgaagttcaactggtacgtggacggcgtggaggtgcacaatgccaagaccaagcccagggaggagcagtacaacagcacctaccgggtggtgtccgtgctgaccgtgctgcaccaggattggctgaacggcaaggagtacaagtgcaaggtgtccaacaaggccctgcctgcccctatcgagaaaaccatcagcaaggccaagggccagcccagagagccccaggtgtacaccctgccccctagcagagatgagctgaccaagaaccaggtgtccctgacctgcctggtgaagggcttctaccccagcgacatcgccgtggagtgggagagcaacggccagcccgagaacaactacaagaccaccccccctgtgctggacagcgatggcagcttcttcctgtacagcaagctgaccgtggacaagagcagatggcagcagggcaacgtgttcagctgcagcgtgatgcacgaggccctgcacaatcactacacccagaagagcctgagcctgtcccctggcaagtga

SEQ ID NO: 691 - DNA, 1026 bp, Artificial Sequence
  Synthetic
gacatctacatgacccagagccccagcagcctgctggcctctgtgggcgatagagtgaccatcacctgcagagccagccaggccatcgacagctacctgcactggtatcagcagaagcctggcaaggcccctaagctgctgatctacagcgccagcaatctggagaccggcgtgcctgccagattcagcggcagcggctccggcaccgacttcaccctgaccatcagcagcctgtaccctgaggatttcgccacctactactgccagcaggtggtgtggagacctttcaccttcggccagggcaccaaggtggagatcaagcgggtggagcccaagagcagcgataagacccacacgtgccccccatgcccagccccagagctgctgggcggacccagcgtgttcctgttcccccccaagcccaaggacaccctgatgatcagcaggacccccgaggtgacctgcgtggtggtggatgtgagccacgaggaccctgaggtgaagttcaactggtacgtggacggcgtggaggtgcacaatgccaagaccaagcccagggaggagcagtacaacagcacctaccgggtggtgtccgtgctgaccgtgctgcaccaggattggctgaacggcaaggagtacaagtgcaaggtgtccaacaaggccctgcctgcccctatcgagaaaaccatcagcaaggccaagggccagcccagagagccccaggtgtacaccctgccccctagcagagatgagctgaccaagaaccaggtgtccctgacctgcctggtgaagggcttctaccccagcgacatcgccgtggagtgggagagcaacggccagcccgagaacaactacaagaccaccccccctgtgctggacagcgatggcagcttcttcctgtacagcaagctgaccgtggacaagagcagatggcagcagggcaacgtgttcagctgcagcgtgatgcacgaggccctgcacaatcactacacccagaagagcctgagcctgtcccctggcaagtga

SEQ ID NO: 692 - DNA, 1026 bp, Artificial Sequence
  Synthetic
gacatctacatgacccagcagcccagcagcctgagcgcctctgtgggcgatagagtgaccatcacctgcagagccagccaggccatcgacagctacctgcactggtatcagcagaagcctggcaaggcccctaagctgctgatctacagcgccagcaatctggagaccggcgtgcctgccagattcagcggcagcggctccggcaccgacttcaccctgaccatcagcagcctgtaccctgaggatttcgccacctactactgccagcaggtggtgtggagacctttcaccttcggccagggcaccaaggtggagatcaagcgggtggagcccaagagcagcgataagacccacacgtgccccccatgcccagccccagagctgctgggcggacccagcgtgttcctgttcccccccaagcccaaggacaccctgatgatcagcaggacccccgaggtgacctgcgtggtggtggatgtgagccacgaggaccctgaggtgaagttcaactggtacgtggacggcgtggaggtgcacaatgccaagaccaagcccagggaggagcagtacaacagcacctaccgggtggtgtccgtgctgaccgtgctgcaccaggattggctgaacggcaaggagtacaagtgcaaggtgtccaacaaggccctgcctgcccctatcgagaaaaccatcagcaaggccaagggccagcccagagagccccaggtgtacaccctgccccctagcagagatgagctgaccaagaaccaggtgtccctgacctgcctggtgaagggcttctaccccagcgacatcgccgtggagtgggagagcaacggccagcccgagaacaactacaagaccaccccccctgtgctggacagcgatggcagcttcttcctgtacagcaagctgaccgtggacaagagcagatggcagcagggcaacgtgttcagctgcagcgtgatgcacgaggccctgcacaatcactacacccagaagagcctgagcctgtcccctggcaagtga

SEQ ID NO: 693 - DNA, 1026 bp, Artificial Sequence
  Synthetic
gacatctacatgacccagcagcccagcagcctgagcgcctctgtgggcgatagagtgaccatcacctgcagagccagccaggccatcgacagctacctgcactggtatcagcagaagcctggcaaggcccctaagctgctgatctacagcgccagcaatctggagaccggcgtgcctgccagattcagcggcagcggctccggcaccgacttcaccctgaccatcagcagcctgctgcctgaggattacgccacctactactgccagcaggtggtgtggagacctttcaccttcggccagggcaccaaggtggagatcaagcgggtggagcccaagagcagcgataagacccacacgtgccccccatgcccagccccagagctgctgggcggacccagcgtgttcctgttcccccccaagcccaaggacaccctgatgatcagcaggacccccgaggtgacctgcgtggtggtggatgtgagccacgaggaccctgaggtgaagttcaactggtacgtggacggcgtggaggtgcacaatgccaagaccaagcccagggaggagcagtacaacagcacctaccgggtggtgtccgtgctgaccgtgctgcaccaggattggctgaacggcaaggagtacaagtgcaaggtgtccaacaaggccctgcctgcccctatcgagaaaaccatcagcaaggccaagggccagcccagagagccccaggtgtacaccctgccccctagcagagatgagctgaccaagaaccaggtgtccctgacctgcctggtgaagggcttctaccccagcgacatcgccgtggagtgggagagcaacggccagcccgagaacaactacaagaccaccccccctgtgctggacagcgatggcagcttcttcctgtacagcaagctgaccgtggacaagagcagatggcagcagggcaacgtgttcagctgcagcgtgatgcacgaggccctgcacaatcactacacccagaagagcctgagcctgtcccctggcaagtga

SEQ ID NO: 694 - DNA, 1026 bp, Artificial Sequence
  Synthetic
gacatctacatgacccagagccccagcagcctgctggcctctgtgggcgatagagtgaccatcacctgcagagccagccaggccatcgacagctacctgcactggtatcagcagaagcctggcaaggcccctaagctgctgatctacagcgccagcaatctggagaccggcgtgcctgccagattcagcggcagcggctccggcaccgacttcaccctgaccatcagcagcctgctgcctgaggattacgccacctactactgccagcaggtggtgtggagacctttcaccttcggccagggcaccaaggtggagatcaagcgggtggagcccaagagcagcgataagacccacacgtgccccccatgcccagccccagagctgctgggcggacccagcgtgttcctgttcccccccaagcccaaggacaccctgatgatcagcaggacccccgaggtgacctgcgtggtggtggatgtgagccacgaggaccctgaggtgaagttcaactggtacgtggacggcgtggaggtgcacaatgccaagaccaagcccagggaggagcagtacaacagcacctaccgggtggtgtccgtgctgaccgtgctgcaccaggattggctgaacggcaaggagtacaagtgcaaggtgtccaacaaggccctgcctgcccctatcgagaaaaccatcagcaaggccaagggccagcccagagagccccaggtgtacaccctgccccctagcagagatgagctgaccaagaaccaggtgtccctgacctgcctggtgaagggcttctaccccagcgacatcgccgtggagtgggagagcaacggccagcccgagaacaactacaagaccaccccccctgtgctggacagcgatggcagcttcttcctgtacagcaagctgaccgtggacaagagcagatggcagcagggcaacgtgttcagctgcagcgtgatgcacgaggccctgcacaatcactacacccagaagagcctgagcctgtcccctggcaagtga

SEQ ID NO: 695 - DNA, 1026 bp, Artificial Sequence
  Synthetic
gacatctacatgacccagcagcccagcagcctgctggcctctgtgggcgatagagtgaccatcacctgcagagccagccaggccatcgacagctacctgcactggtatcagcagaagcctggcaaggcccctaagctgctgatctacagcgccagcaatctggagaccggcgtgcctagcagattcagcggcagcggctccggcaccgacttcaccctgaccatcagcagcctgctgcctgaggattacgccacctactactgccagcaggtggtgtggagacctttcaccttcggccagggcaccaaggtggagatcaagcgggtggagcccaagagcagcgataagacccacacgtgccccccatgcccagccccagagctgctgggcggacccagcgtgttcctgttcccccccaagcccaaggacaccctgatgatcagcaggacccccgaggtgacctgcgtggtggtggatgtgagccacgaggaccctgaggtgaagttcaactggtacgtggacggcgtggaggtgcacaatgccaagaccaagcccagggaggagcagtacaacagcacctaccgggtggtgtccgtgctgaccgtgctgcaccaggattggctgaacggcaaggagtacaagtgcaaggtgtccaacaaggccctgcctgcccctatcgagaaaaccatcagcaaggccaagggccagcccagagagccccaggtgtacaccctgccccctagcagagatgagctgaccaagaaccaggtgtccctgacctgcctggtgaagggcttctaccccagcgacatcgccgtggagtgggagagcaacggccagcccgagaacaactacaagaccaccccccctgtgctggacagcgatggcagcttcttcctgtacagcaagctgaccgtggacaagagcagatggcagcagggcaacgtgttcagctgcagcgtgatgcacgaggccctgcacaatcactacacccagaagagcctgagcctgtcccctggcaagtga

SEQ ID NO: 696 - DNA, 1026 bp, Artificial Sequence
  Synthetic
gacatctacatgacccagagccccagcagcctgagcgcctctgtgggcgatagagtgaccatcacctgcagagccagccaggccatcgacagctacctgcactggtatcagcagaagcctggcaaggcccctaagctgctgatctacagcgccagcaatctggagaccggcgtgcctgccagattcagcggcagcggctccggcaccgacttcaccctgaccatcagcagcctgtaccctgaggattacgccacctactactgccagcaggtggtgtggagacctttcaccttcggccagggcaccaaggtggagatcaagcgggtggagcccaagagcagcgataagacccacacgtgccccccatgcccagccccagagctgctgggcggacccagcgtgttcctgttcccccccaagcccaaggacaccctgatgatcagcaggacccccgaggtgacctgcgtggtggtggatgtgagccacgaggaccctgaggtgaagttcaactggtacgtggacggcgtggaggtgcacaatgccaagaccaagcccagggaggagcagtacaacagcacctaccgggtggtgtccgtgctgaccgtgctgcaccaggattggctgaacggcaaggagtacaagtgcaaggtgtccaacaaggccctgcctgcccctatcgagaaaaccatcagcaaggccaagggccagcccagagagccccaggtgtacaccctgccccctagcagagatgagctgaccaagaaccaggtgtccctgacctgcctggtgaagggcttctaccccagcgacatcgccgtggagtgggagagcaacggccagcccgagaacaactacaagaccaccccccctgtgctggacagcgatggcagcttcttcctgtacagcaagctgaccgtggacaagagcagatggcagcagggcaacgtgttcagctgcagcgtgatgcacgaggccctgcacaatcactacacccagaagagcctgagcctgtcccctggcaagtga

SEQ ID NO: 697 - DNA, 1026 bp, Artificial Sequence
  Synthetic
gacatctacatgacccagcagcccagcagcctgctggcctctgtgggcgatagagtgaccatcacctgcagagccagccaggccatcgacagctacctgcactggtatcagcagaagcctggcaaggcccctaagctgctgatctacagcgccagcaatctggagaccggcgtgcctgccagattcagcggcagcggctccggcaccgacttcaccctgaccatcagcagcctgctgcctgaggatttcgccacctactactgccagcaggtggtgtggagacctttcaccttcggccagggcaccaaggtggagatcaagcgggtggagcccaagagcagcgataagacccacacgtgccccccatgcccagccccagagctgctgggcggacccagcgtgttcctgttcccccccaagcccaaggacaccctgatgatcagcaggacccccgaggtgacctgcgtggtggtggatgtgagccacgaggaccctgaggtgaagttcaactggtacgtggacggcgtggaggtgcacaatgccaagaccaagcccagggaggagcagtacaacagcacctaccgggtggtgtccgtgctgaccgtgctgcaccaggattggctgaacggcaaggagtacaagtgcaaggtgtccaacaaggccctgcctgcccctatcgagaaaaccatcagcaaggccaagggccagcccagagagccccaggtgtacaccctgccccctagcagagatgagctgaccaagaaccaggtgtccctgacctgcctggtgaagggcttctaccccagcgacatcgccgtggagtgggagagcaacggccagcccgagaacaactacaagaccaccccccctgtgctggacagcgatggcagcttcttcctgtacagcaagctgaccgtggacaagagcagatggcagcagggcaacgtgttcagctgcagcgtgatgcacgaggccctgcacaatcactacacccagaagagcctgagcctgtcccctggcaagtga

SEQ ID NO: 698 - DNA, 1026 bp, Artificial Sequence; identical to SEQ ID NO: 697
  Synthetic

SEQ ID NO: 699 - DNA, 1026 bp, Artificial Sequence
  Synthetic
gacatctacatgacccagagccccagcagcctgctggcctctgtgggcgatagagtgaccatcacctgcagagccagccaggccatcgacagctacctgcactggtatcagcagaagcctggcaaggcccctaagctgctgatctacagcgccagcaatctggagaccggcgtgcctagcagattcagcggcagcggctccggcaccgacttcaccctgaccatcagcagcctgtaccctgaggattacgccacctactactgccagcaggtggtgtggagacctttcaccttcggccagggcaccaaggtggagatcaagcgggtggagcccaagagcagcgataagacccacacgtgccccccatgcccagccccagagctgctgggcggacccagcgtgttcctgttcccccccaagcccaaggacaccctgatgatcagcaggacccccgaggtgacctgcgtggtggtggatgtgagccacgaggaccctgaggtgaagttcaactggtacgtggacggcgtggaggtgcacaatgccaagaccaagcccagggaggagcagtacaacagcacctaccgggtggtgtccgtgctgaccgtgctgcaccaggattggctgaacggcaaggagtacaagtgcaaggtgtccaacaaggccctgcctgcccctatcgagaaaaccatcagcaaggccaagggccagcccagagagccccaggtgtacaccctgccccctagcagagatgagctgaccaagaaccaggtgtccctgacctgcctggtgaagggcttctaccccagcgacatcgccgtggagtgggagagcaacggccagcccgagaacaactacaagaccaccccccctgtgctggacagcgatggcagcttcttcctgtacagcaagctgaccgtggacaagagcagatggcagcagggcaacgtgttcagctgcagcgtgatgcacgaggccctgcacaatcactacacccagaagagcctgagcctgtcccctggcaagtga

SEQ ID NO: 700 - DNA, 1026 bp, Artificial Sequence
  Synthetic
gacatctacatgacccagcagcccagcagcctgagcgcctctgtgggcgatagagtgaccatcacctgcagagccagccaggccatcgacagctacctgcactggtatcagcagaagcctggcaaggcccctaagctgctgatctacagcgccagcaatctggagaccggcgtgcctagcagattcagcggcagcggctccggcaccgacttcaccctgaccatcagcagcctgtaccctgaggattacgccacctactactgccagcaggtggtgtggagacctttcaccttcggccagggcaccaaggtggagatcaagcgggtggagcccaagagcagcgataagacccacacgtgccccccatgcccagccccagagctgctgggcggacccagcgtgttcctgttcccccccaagcccaaggacaccctgatgatcagcaggacccccgaggtgacctgcgtggtggtggatgtgagccacgaggaccctgaggtgaagttcaactggtacgtggacggcgtggaggtgcacaatgccaagaccaagcccagggaggagcagtacaacagcacctaccgggtggtgtccgtgctgaccgtgctgcaccaggattggctgaacggcaaggagtacaagtgcaaggtgtccaacaaggccctgcctgcccctatcgagaaaaccatcagcaaggccaagggccagcccagagagccccaggtgtacaccctgccccctagcagagatgagctgaccaagaaccaggtgtccctgacctgcctggtgaagggcttctaccccagcgacatcgccgtggagtgggagagcaacggccagcccgagaacaactacaagaccaccccccctgtgctggacagcgatggcagcttcttcctgtacagcaagctgaccgtggacaagagcagatggcagcagggcaacgtgttcagctgcagcgtgatgcacgaggccctgcacaatcactacacccagaagagcctgagcctgtcccctggcaagtga

SEQ ID NO: 701 - DNA, 1026 bp, Artificial Sequence
  Synthetic
gacatccagatgacccagcagcccagcagcctgctggcctctgtgggcgatagagtgaccatcacctgcagagccagccaggccatcgacagctacctgcactggtatcagcagaagcctggcaaggcccctaagctgctgatctacagcgccagcaatctggagaccggcgtgcctagcagattcagcggcagcggctccggcaccgacttcaccctgaccatcagcagcctgtaccctgaggattacgccacctactactgccagcaggtggtgtggagacctttcaccttcggccagggcaccaaggtggagatcaagcgggtggagcccaagagcagcgataagacccacacgtgccccccatgcccagccccagagctgctgggcggacccagcgtgttcctgttcccccccaagcccaaggacaccctgatgatcagcaggacccccgaggtgacctgcgtggtggtggatgtgagccacgaggaccctgaggtgaagttcaactggtacgtggacggcgtggaggtgcacaatgccaagaccaagcccagggaggagcagtacaacagcacctaccgggtggtgtccgtgctgaccgtgctgcaccaggattggctgaacggcaaggagtacaagtgcaaggtgtccaacaaggccctgcctgcccctatcgagaaaaccatcagcaaggccaagggccagcccagagagccccaggtgtacaccctgccccctagcagagatgagctgaccaagaaccaggtgtccctgacctgcctggtgaagggcttctaccccagcgacatcgccgtggagtgggagagcaacggccagcccgagaacaactacaagaccaccccccctgtgctggacagcgatggcagcttcttcctgtacagcaagctgaccgtggacaagagcagatggcagcagggcaacgtgttcagctgcagcgtgatgcacgaggccctgcacaatcactacacccagaagagcctgagcctgtcccctggcaagtga

SEQ ID NO: 702 - DNA, 1026 bp, Artificial Sequence
  Synthetic
gacatccagatgacccagcagcccagcagcctgctggcctctgtgggcgatagagtgaccatcacctgcagagccagccaggccatcgacagctacctgcactggtatcagcagaagcctggcaaggcccctaagctgctgatctacagcgccagcaatctggagaccggcgtgcctgccagattcagcggcagcggctccggcaccgacttcaccctgaccatcagcagcctgctgcctgaggattacgccacctactactgccagcaggtggtgtggagacctttcaccttcggccagggcaccaaggtggagatcaagcgggtggagcccaagagcagcgataagacccacacgtgccccccatgcccagccccagagctgctgggcggacccagcgtgttcctgttcccccccaagcccaaggacaccctgatgatcagcaggacccccgaggtgacctgcgtggtggtggatgtgagccacgaggaccctgaggtgaagttcaactggtacgtggacggcgtggaggtgcacaatgccaagaccaagcccagggaggagcagtacaacagcacctaccgggtggtgtccgtgctgaccgtgctgcaccaggattggctgaacggcaaggagtacaagtgcaaggtgtccaacaaggccctgcctgcccctatcgagaaaaccatcagcaaggccaagggccagcccagagagccccaggtgtacaccctgccccctagcagagatgagctgaccaagaaccaggtgtccctgacctgcctggtgaagggcttctaccccagcgacatcgccgtggagtgggagagcaacggccagcccgagaacaactacaagaccaccccccctgtgctggacagcgatggcagcttcttcctgtacagcaagctgaccgtggacaagagcagatggcagcagggcaacgtgttcagctgcagcgtgatgcacgaggccctgcacaatcactacacccagaagagcctgagcctgtcccctggcaagtga

SEQ ID NO: 703 - DNA, 1026 bp, Artificial Sequence
  Synthetic
gacatccagatgacccagcagcccagcagcctgctggcctctgtgggcgatagagtgaccatcacctgcagagccagccaggccatcgacagctacctgcactggtatcagcagaagcctggcaaggcccctaagctgctgatctacagcgccagcaatctggagaccggcgtgcctgccagattcagcggcagcggctccggcaccgacttcaccctgaccatcagcagcctgtaccctgaggatttcgccacctactactgccagcaggtggtgtggagacctttcaccttcggccagggcaccaaggtggagatcaagcgggtggagcccaagagcagcgataagacccacacgtgccccccatgcccagccccagagctgctgggcggacccagcgtgttcctgttcccccccaagcccaaggacaccctgatgatcagcaggacccccgaggtgacctgcgtggtggtggatgtgagccacgaggaccctgaggtgaagttcaactggtacgtggacggcgtggaggtgcacaatgccaagaccaagcccagggaggagcagtacaacagcacctaccgggtggtgtccgtgctgaccgtgctgcaccaggattggctgaacggcaaggagtacaagtgcaaggtgtccaacaaggccctgcctgcccctatcgagaaaaccatcagcaaggccaagggccagcccagagagccccaggtgtacaccctgccccctagcagagatgagctgaccaagaaccaggtgtccctgacctgcctggtgaagggcttctaccccagcgacatcgccgtggagtgggagagcaacggccagcccgagaacaactacaagaccaccccccctgtgctggacagcgatggcagcttcttcctgtacagcaagctgaccgtggacaagagcagatggcagcagggcaacgtgttcagctgcagcgtgatgcacgaggccctgcacaatcactacacccagaagagcctgagcctgtcccctggcaagtga

SEQ ID NO: 704 - DNA, 1026 bp, Artificial Sequence
  Synthetic
gacatccagatgacccagcagcccagcagcctgagcgcctctgtgggcgatagagtgaccatcacctgcagagccagccaggccatcgacagctacctgcactggtatcagcagaagcctggcaaggcccctaagctgctgatctacagcgccagcaatctggagaccggcgtgcctgccagattcagcggcagcggctccggcaccgacttcaccctgaccatcagcagcctgtaccctgaggattacgccacctactactgccagcaggtggtgtggagacctttcaccttcggccagggcaccaaggtggagatcaagcgggtggagcccaagagcagcgataagacccacacgtgccccccatgcccagccccagagctgctgggcggacccagcgtgttcctgttcccccccaagcccaaggacaccctgatgatcagcaggacccccgaggtgacctgcgtggtggtggatgtgagccacgaggaccctgaggtgaagttcaactggtacgtggacggcgtggaggtgcacaatgccaagaccaagcccagggaggagcagtacaacagcacctaccgggtggtgtccgtgctgaccgtgctgcaccaggattggctgaacggcaaggagtacaagtgcaaggtgtccaacaaggccctgcctgcccctatcgagaaaaccatcagcaaggccaagggccagcccagagagccccaggtgtacaccctgccccctagcagagatgagctgaccaagaaccaggtgtccctgacctgcctggtgaagggcttctaccccagcgacatcgccgtggagtgggagagcaacggccagcccgagaacaactacaagaccaccccccctgtgctggacagcgatggcagcttcttcctgtacagcaagctgaccgtggacaagagcagatggcagcagggcaacgtgttcagctgcagcgtgatgcacgaggccctgcacaatcactacacccagaagagcctgagcctgtcccctggcaagtga

SEQ ID NO: 705 - DNA, 1026 bp, Artificial Sequence
  Synthetic
gacatctacatgacccagcagcccagcagcctgctggcctctgtgggcgatagagtgaccatcacctgcagagccagccaggccatcgacagctacctgcactggtatcagcagaagcctggcaaggcccctaagctgctgatctacagcgccagcaatctggagaccggcgtgcctagcagattcagcggcagcggctccggcaccgacttcaccctgaccatcagcagcctgtaccctgaggatttcgccacctactactgccagcaggtggtgtggagacctttcaccttcggccagggcaccaaggtggagatcaagcgggtggagcccaagagcagcgataagacccacacgtgccccccatgcccagccccagagctgctgggcggacccagcgtgttcctgttcccccccaagcccaaggacaccctgatgatcagcaggacccccgaggtgacctgcgtggtggtggatgtgagccacgaggaccctgaggtgaagttcaactggtacgtggacggcgtggaggtgcacaatgccaagaccaagcccagggaggagcagtacaacagcacctaccgggtggtgtccgtgctgaccgtgctgcaccaggattggctgaacggcaaggagtacaagtgcaaggtgtccaacaaggccctgcctgcccctatcgagaaaaccatcagcaaggccaagggccagcccagagagccccaggtgtacaccctgccccctagcagagatgagctgaccaagaaccaggtgtccctgacctgcctggtgaagggcttctaccccagcgacatcgccgtggagtgggagagcaacggccagcccgagaacaactacaagaccaccccccctgtgctggacagcgatggcagcttcttcctgtacagcaagctgaccgtggacaagagcagatggcagcagggcaacgtgttcagctgcagcgtgatgcacgaggccctgcacaatcactacacccagaagagcctgagcctgtcccctggcaagtga

SEQ ID NO: 706 - DNA, 1026 bp, Artificial Sequence; identical to SEQ ID NO: 701
  Synthetic

SEQ ID NO: 707 - DNA, 1026 bp, Artificial Sequence
  Synthetic
gacatccagatgacccagagccccagcagcctgctggcctctgtgggcgatagagtgaccatcacctgcagagccagccaggccatcgacagctacctgcactggtatcagcagaagcctggcaaggcccctaagctgctgatctacagcgccagcaatctggagaccggcgtgcctgccagattcagcggcagcggctccggcaccgacttcaccctgaccatcagcagcctgtaccctgaggattatgccacctactactgccagcaggtggtgtggagacctttcaccttcggccagggcaccaaggtggagatcaagcgggtggagcccaagagcagcgataagacccacacgtgccccccatgcccagccccagagctgctgggcggacccagcgtgttcctgttcccccccaagcccaaggacaccctgatgatcagcaggacccccgaggtgacctgcgtggtggtggatgtgagccacgaggaccctgaggtgaagttcaactggtacgtggacggcgtggaggtgcacaatgccaagaccaagcccagggaggagcagtacaacagcacctaccgggtggtgtccgtgctgaccgtgctgcaccaggattggctgaacggcaaggagtacaagtgcaaggtgtccaacaaggccctgcctgcccctatcgagaaaaccatcagcaaggccaagggccagcccagagagccccaggtgtacaccctgccccctagcagagatgagctgaccaagaaccaggtgtccctgacctgcctggtgaagggcttctaccccagcgacatcgccgtggagtgggagagcaacggccagcccgagaacaactacaagaccaccccccctgtgctggacagcgatggcagcttcttcctgtacagcaagctgaccgtggacaagagcagatggcagcagggcaacgtgttcagctgcagcgtgatgcacgaggccctgcacaatcactacacccagaagagcctgagcctgtcccctggcaagtga

SEQ ID NO: 708 - DNA, 1026 bp, Artificial Sequence
  Synthetic
gacatctacatgacccagcagcccagcagcctgctggcctctgtgggcgatagagtgaccatcacctgcagagccagccaggccatcgacagctacctgcactggtatcagcagaagcctggcaaggcccctaagctgctgatctacagcgccagcaatctggagaccggcgtgcctgccagattcagcggcagcggctccggcaccgacttcaccctgaccatcagcagcctgtaccctgaggattatgccacctactactgccagcaggtggtgtggagacctttcaccttcggccagggcaccaaggtggagatcaagcgggtggagcccaagagcagcgataagacccacacgtgccccccatgcccagccccagagctgctgggcggacccagcgtgttcctgttcccccccaagcccaaggacaccctgatgatcagcaggacccccgaggtgacctgcgtggtggtggatgtgagccacgaggaccctgaggtgaagttcaactggtacgtggacggcgtggaggtgcacaatgccaagaccaagcccagggaggagcagtacaacagcacctaccgggtggtgtccgtgctgaccgtgctgcaccaggattggctgaacggcaaggagtacaagtgcaaggtgtccaacaaggccctgcctgcccctatcgagaaaaccatcagcaaggccaagggccagcccagagagccccaggtgtacaccctgccccctagcagagatgagctgaccaagaaccaggtgtccctgacctgcctggtgaagggcttctaccccagcgacatcgccgtggagtgggagagcaacggccagcccgagaacaactacaagaccaccccccctgtgctggacagcgatggcagcttcttcctgtacagcaagctgaccgtggacaagagcagatggcagcagggcaacgtgttcagctgcagcgtgatgcacgaggccctgcacaatcactacacccagaagagcctgagcctgtcccctggcaagtga

SEQ ID NO: 709 - DNA, 1026 bp, Artificial Sequence
  Synthetic
gacatccagatgacccagagccccagcagcctgagcgcctctgtgggcgatagagtgaccatcacctgcagagccagccaggccatcgacagctacctgcactggtatcagcagaagcctggcaaggcccctaagctgctgatctacagcgccagcaatctggagaccggcgtgcctagcagattcagcggcagcggctccggcaccgacttcaccctgaccatcagcagcctgctgcctgaggatttcgccacctactactgccagcaggtggtgtggagacctttcaccttcggccagggcaccaaggtggagatcaagcgggtggagcccaagagcagcgataagacccacacctgccccccctgccctgcccccgagctgctgggcggacccagcgtgttcctgttcccccccaagcctaaggacaccctgatgatcagcagaacccccgaggtgacctgcgtggtggtggatgtgagccacgaggaccctgaggtgaagttcaactggtacgtggacggcgtggaggtgcacaatgccaagaccaagcccagggaggagcagtacaacagcacctaccgggtggtgtccgtgctgaccgtgctgcaccaggattggctgaacggcaaggagtacaagtgcaaggtgtccaacaaggccctgcctgcccctatcgagaaaaccatcagcaaggccaagggccagcccagagagccccaggtgtacaccctgccccctagcagagatgagctgaccaagaaccaggtgtccctgacctgcctggtgaagggcttctaccccagcgacatcgccgtggagtgggagagcaacggccagcccgagaacaactacaagaccaccccccctgtgctggacagcgatggcagcttcttcctgtacagcaagctgaccgtggacaagagcagatggcagcagggcaacgtgttcagctgcagcgtgatgcacgaggccctgcacaatcactacacccagaagagcctgagcctgtcccctggcaagtga
